United States Patent Application Publication US 2026/0191916 A1 - sequence listing, part 66

SEQ ID NO: 426 - DNA, 2987147 bp, Extibacter hylemonae (residues 1,493,575-2,987,147 of 2,987,147)
  source 1..2987147: mol_type = genomic DNA
ttttagagacgctgtttcaaagcagccggactccttcatctcttctgtaagttctccgcagctgtctacaatcactttataactcatatctttcctcccggcataccatatctgtgtttagtcggcatgtcatttattgctataatatgtagttttcaatactacattagtaatcatagcacatttataatggaaataaaagtatttttattaaagttttcccagtctgttcagtcttcaaacttgatttttctcgacacaccgagagcaattcccatctctatagtcaaaaacagaattgatgttcccccatagctgataaacggcagcgtgattccggtcgtcgggatgaggtttatcacgaccgccacgttcaggatcacctgcagggcaatatgtgcgaaaatacctgtcacaatgagagaaccatatatatccggcgcattctgggcaataaacagaagccggtacagcagcattccgaacagcacaaggaccagaatcgccccgaacactcccaactcctcacatataatagaaagaatcatatcattctgtacctcaggtattatcatcttctgcgcactgtttcccagaccttttccaaaaaaacctccggagccgatggcgtacagcgcctgcatgatctgataaccgccttccgcggcgtggtcctccggcgcaagccagacaagtattctccgcatacggaagttctcgctcgtcacaagcacccgccccatgatctgaaccgctatcagtatgactcccatgccggccgtaaacagcgcaataaacggagccgtcttaggatgtacgacaaataccataatacatgttatacccataacaatgatagccgtgctcagattgtccgtcagaaacaggacacaggccgccgaaaaagcgccccatgcaagtattttccctatccccctgagtgtctttatctcttttcccatcttacagataagcacggggatgaataggatgatcgcgatcttggccacctccgccggctggaactgctggtcgaatggaagctgtatccaccgctttgctccatttacctcttttccgagaggcgtcttaacgagaagcattaaaaatatggaaactatgtacagaggtttcgcccactttatataaatgtgataatcaaactttgccaccacgaaaatcacaatgagtcccatcacacagaatatcaactgacgtttaaaataatgcatactgtccccataagtcacaagggcactgtaagaactcgtactatacagcatcacaagtccaaaacaaataagaaatataagaaccgctagcatactgtaatcaaaataccgcgttttagacattttcttttttcttgtcttctgatttctcgccataatatttacactccaatctatcgttcttattataacgatatcagaacataaaaacaactgaattttgtctgaattgcgaaaggggtcagacccctgtggccacaggggtctgacccctttcgcaattcaggtcattttctgacaattggcagtctgcggtatttcacttatctcgcacgttattcccatctcgtcccacacccgcctgcaatgaccgataaagtcctctttctctcttgcttttgtgatatggaacagttcccgcccgctcccggtaaagcgtacattgccattgctcactcttttcccggactgaagtctgatcttgcaagaagcatactgcagcgccggcaccgccttcggcagaacaaaatcttcgtggacgtcatattctatcagaccgaggttatcaagctggacaaggctctgtctttttattccgttcctattataataggaaggatggtttctcatatagataaacggatatatctctcccggctcctgaccactgacgagcgtcatggcgcacagtctgcagaatacctctatgtcatctgctcccataacagaaaatgtgttaatgagtctctttgtgacaccaggcgaaccgtttactttcattgccagcagtctgccccatattttctgcagttcttcatctgaagtattcttcgcatactcaaaaaaataaaacagccagtcctggtccacgtgttcgggttttgcgtcttcttttatctctcgtgcggcatgctctataattttcccctgatttatgtatttcctcagttcattcctggaagccgatatcttaaccgctttttccaggccgtctataaccggatcttcgattatatgtgttttgtacagttcaagtccctcttcaaaatcccgcctcttacctttgggagcaagcagccatccggtgccttttactatcatgtccagcagtttgactattacagcgctcgattcagacatatcaaacaatgaaagcttcttatccatatcattactccttaaaatgtgacgttatatttcaattataacatctgtcttccgccgcatcaaatcagccttttatgaaatacatattttactgcatctgtgcgcatgatacatttgaaaggagtgtgtgcatatgaaagaaaacaaatcttcatttacaacagaacgcccgatcgactacacggaaagcaaagacgcttacgacggaaaaatcagttccgcggcctccgaaagagccgccgagccgcttccggaatccgaacgtccgagaaaagacggaccgggcggcgagtaaataccggccaacttgaatatcctttccttctaaaaaaatacgcgccgcttcttttattcctgaagcggcacgtattttttgcctaccggtactgtccggggatcatatctctcagcttttctgtctcacactcttgcatttccggtacatccgccagaggaaacggtatgcccatcgcatcatatttctccagacaaagcttccgaaacggcaacagttcgatcttctccacgttgggatactccgtcagaaaatccaccagtttctcaatgtattcttccgtgtcgttaatgcccggaaccacgacccgccgtatccaaagtggtatatcccgcttttttgtcaagtcgagaaaggcggtaacttcccggaaatctgcccggcagtagcgtctgtactcttcctccgtgagaaatttcacatctgccagaacaaggtctgtatactcaagcacacgttctgccaactgcaaattcccgatgccgctcgtgtccagcgctgtgtggaatccttcttcctttagtatacgaaacagttccgccgtaaattccggctgcataagcggctctcctccggtcaccgtgacaccgccgttcgccagatacggccggtaccttcggatctttcctgcaacctcctgcggactgaattcctctccttcttcaaacttccacgtatccggattatggcagtaagcgcaccgaagagggcatccctgcataaataccacataccgaagtcccgggccgtccaccgcccccatagactggaaggagtggatgcgcccgctacatcgcttcatggaaggtacgtgaaataacttctttctgctgttcacgtgtcagcttgttgaagttcacggcataaccggacacacggatcgtcagattcgggtacttctccgggttatcataggcgtccagaagcgtgtctctgttcagtacatttacgttcaaatgatgcgccatctgtccaaaatacccgtccagtatggcagtcagattgtcaagcctttcttcctccgtcttgccgagtgcctggggcacgatggaaaatgtattggagatgccgtccttgcagtatttgtaagacagcttggccacagaattgagtgaggctagcgcgccgtttttctctctgccgtgcatcgggttcgccccgggcgcaaacggttctcccgccttgcggccgtccggtgtcgatccggtcttctttccgtacactacattggatgtgatcgtaagtatggagagcgtcggttctgcatcgcggtacagcttctgctttttcaattcctcatagaacagcttcacctgctcgcaggcaatgtcatccacacggtcatcatcatttccgaaagccgggtactcaccttcgatctcgaagtccttgatgagtcctgtatcttcgtcgcggatacattttacccgggcatatttgatggcagaaagcgagtccgccagcacactcattccggcgatcccaaacgccataaaacgatgcacctctgtgtcgtgcagcgccatctgcgtcttttcatatgcgtatttgtcatgcatatagtgaatgacattcatcgtatttgcatacatcctcacaagccacggacggtatgtatcgagcagttccgtcacctttccataatcgaggtattccccctcgtacggttcatgcgccggcccgacctgaatgttctgcttctcatctttcccgccgttcagcgacatgagcaggagctttgccagattggcgcgggccccaaagaactgcatctccttgccgatcctcatggcagacacacagcaggcgatcccgtagtcgtcgccgaactgcggacgcatcagatcgtcattttcatattggatcgcatctgtatcacaggatacttttgtacagaacttcttgaaattatccggcaggtctttggaccagagcactgtaagattcggctctgcggacggcttcaggttgtaaagcgtatggagcatgcggaaggaattctttgtcacaagcgttcttccgtcctcgcccatcccgccgacagactctgtgatccacatcgggtcaccggcaaacagctcattataatccggcgtgcgcagatgacgcgccatgcgcagcttcattacgaaatcgtcaatgatctcctgcgcgccttcctccgtgagaatcccttttgcaatatcacgttcaaaatagatatccagaaatgtggacgtacggccaagactcatcgccgcaccattctgctctttgatagcgccgagatatgcaaagtagagccattgtacagcttccttcgcatccgcggcaggccttgttatgtcaaatccgtacatcgccgccatatcacgcagtttcccaaggaaattgatctgctggtacagctcttcctgctggcgcacatggtccacgtccatgacctccatgctcagactgtctttatccgcctgtttctgctcaagcagatagtccaggccgtagagggcaacacgccggtaatccccgattatacggccgcggccgtaagcgtccggaagaccggtgatgaggccacagtgtctggcagcttttgtctctttgttatatgcgcggaacacaccgtcattgtgtgtcgtcctgtactggaactcatcctccactttctgtgacagctcatagccataggcacggcacgcgtccctcgtcatgcgcagtccgccgaacggattgacccctctctttaaaggacgatccgtctgaaggccgacgatgacctcgttttccttgtccagataaccgggcttataattcaaaagagaagtgaccgtctgggtatcaatatcaagcacacccccgaactcacgctccagcgccagcagattctcaaacttatgcagcagtttaccggtacgctctgtcgccggcttcaggaaatccccgtttcctgtgtacggcgtataattattctggataaaatcacgtacattgatctcctcctgccactttccaggcttaaaaccttcccactgtgtaaacatcttccattcctcctgttctctttgtgtatgacatcattccgcgctctcttttcattggggtcagacccctttcggaaggggtctggcccctatcgacaggccctatcgacaaaaaaagagcagcaccagaaaatgatgctgcccagacggtcggcttattccaagacttcattcccctgtggtaacccacattatccgtcagtaatgaagtcctttttgtttactttacggggtgagtataacactaaccaccctccaaagtcaagcaaattttgaaaggggtcagaccccctgcatatgcaggggtctgaccccttcgacaattcacactattgtctgacatcaaattctggattgatcgcatagaagttcttgctgtccagattatcctgtacgatgcgcagagattcgccgaaacgctgatagtgtacgatctcccgttctctcaggaaacggatcggctcacacacctcaggatcctttacgagtctcagaatattatcgtaagtagtccgcgctttttgttctgctgccatgtcttcgtggaggtctgttatcggatctcctttagactggaagtatgttgctgtccacggcgcgccgctggccgcctgtggccacaatgccagtgtatggtccacatagtatttgtcaaagcctgaccgttctatttcttccggtgacagatttctcgtcagctgatggacgatggcacagaccatctccatatgagcaagttcttctgttcctatatcggtcagtatgccggtcacttccttatacggcatcgtatacctctgtgaaagatatctcatggatgctgccagctctccgtccggtccgccgaactgggaaatgatcacctgggcgatcttcgggttcgtctgtgtgatctttaccggatgctgcagtcttttctcataattccacatatattagcatcctccttcctgccacggccatggctcatcgatccacttccacctgtctgcttccgtatcggcagtatcaagtgtcagcgggccgtagtatttggcatattcttttaatgcctgtacgcgctgcttcttaaactcatcgaagaattcgagcgcttccgcattgcatggatgtgtatcgagaaacagttttacatcgtccaccgcaaagctcaccacattgatccaatccaacagttcccgtctgcaaggtttattgtctgtcatctcgaacaccctcctatcccccggaatggtttgttcagttcttcaaaaattgtaccgcagtgaaatcctttttcaacttcgtacaaggcacgccacttctgccacggtacgtacgccattgctatgggcataccgctcagttcgtcacaggccgctctgtcttcacagcaggccggctgtactttcgtacggcagccttcttctctcatgacaggcgctgttctgctgcagttattacgtcttccgcactcagacgcattataacgataattcggcatgtgtcatactccttccataatcatttgcaatactataatatggaacaaaccggaaagttgtgcaaaaaaagaccgctgatcacagatggctatccatctgtattcagcggtctctctatcgcctgcttattttaagaacatataaatgatcaacgctgccacggctacgatcgctatcccgagaatgatcaccggtactttggacaccttatcatcctctaaatcataataatcatcctcatcttccggctccggccttttcttcggccgctttctcggtctttcatcatccacggaaagcagttcgtcatatgccctgcgcatttccttttcacgcttatcccgcacttttttcggaggaatattggcatatctttgttcttcttcctcttctttctgctgcttcgctccggatactctaaacttcttcctgcagttgaagcacagcatataatccggatctttctggctcggctttaacggctggccgcattttggacatttcatgggaatctgtccctcctcgttcgtttatatctttttcactcactgcgtattatactatataaccggataaatatcaaagcaatttacacagcaaattaaacttattgaacttcttacgttcaaccagagtgcgtttccctatacctcggcagaaaatccaaggtcgtccagcgcctccagcgccgtcttcacacagtgctcacaaccgtctaccgtcactgtcttatcctcaagactcactttaaagtccagcccttcctctgtcaaaagcctggagatcctctccacgcatttttcgcaatgcatatctgccactttgatcactgtcatctgtctgctcctcctatttcatcaatttttgaattgtgtcgcacagctcgtcgaccacttctacatttccgtcctgtatatcatccaccacacatgtgtggatgtgattgacaagcagctttttgctgaacgcgttcagggctgcctggaccgcggaaacctgcgtcagtatatccacacagtaccgctcctcctccagcatcttcttgatgccccttacctgtccttccacacggttcagccttgtcaccagttccttatattcaccggcatcccggtgctttgtacggctcgtacaatagttgttttcttccatagatccctctcctcttaacgtacttgacttacaatctcaatcttcggagcctgagtgcatttcccacgacagtcacggaacttaaggacatggcaagtcccgcgaatacaggattcagaagcgttccgtttatggcgtacagcgcgcccgccgccagcggaataccgcagctgttatagaaaaatgcccagaacagattctgcttgatatttcttatggtagcattgctcagccggatcgccttatagacatcgttcagatctgacttcataaggaccatatctcctgagtcaatagcgatatcactgccacttccaatggccaccccgacgtccgcctgtacgagagccggcgcatcattgatcccgtctcccaccatcatcacacagcgtccttccttctgaagcctctccaccacatttgccttatcctgcggcagcacctccgcgactacctcgtctactcctactttaccgccaatatactctgccgtcaaccggttatctcctgtcagcatataaacttgaatgcccagctccttcatacgggcaatagcgtccctgctcgtttccttcaccggatctgccacgcttatgatgcccacaggcacagcttcttctttcccgccgtcttcggggcttcccatcctgcggataacaaacataggtgtctgcccctttgcggctatttcttccgccgcctcacggtatggtccggggctgatcccaagtgactcgcatagtttcctgtttccgatataatacgtgccgctgccgatgactgcttcgatcccctgtccagtgacactctgaaactcttctgccttcagaagtccgaggcctctcccgcgggcctcctccacgatcgcgcgcccgagcggatgctccgatgcctgctcgcaggatgccgctatgcgaagcagctgttcctcggtctcctcatggcttacgatctgcatgaccgcaggttttccttccgtgatcgtacctgtcttgtcgaggacgaccgcatctgccttgtgggcaatctcaagcgcctcgccgctcttgatcagaataccgttcccggccccgagacctgtgccgaccattatggccgtcggcgttgcaaggccaagggcacaaggacacgcgatgacaagcacagatacgaatatcgtaagcacaaacgcagcgtcatggccaagcagcgcccacacgaccgcagcgataaacgcaatacacatgaccgcagggacaaaatacccagccaccgtatccgcaagctttgagatcggcgccttcctcccctgagcgtcctccatcatcttcacaatctttgcaagcgtcgtctccgagccgacacgggtcactctgaccgtgaccgcgccctgataattgacactgccgccgatgacttcagagcctgcttccttctctgcgggaatactttcaccggtgagcatggattcatctactgttgtccggccttcggtaatgatgccgtccagcggtactttatctcccggcctgatgaggatcagctcatcctgtcttacctgctccaccggcacctccgtctgctctccattcctcagcacgcacgccgtatccggcgccagctccatcagctttcggatcgcatcctttgtcttgttcttgctccggccctccatatactttccgaccatgacaagcgtcaccacgatggccgcagattcatagtacagatgatggactgccgtgctgtccgaacgtatgagaaatgtcatcacaagactgtacagatatgcgcttcccgtacctatggccacaagggagtccatattcggatgccctctgaacagacttttaaacccgacaagatagaatttccttccgttgaacaaaatgactgtcgtgagtataagctgcgccaacgcaaaattcagcgggctgtgatgcatatccagcactgccggaagcggcatcgggaagggaaccatatgccccatggaaatataaagcagaggaacggcaagtatgatatttacgatgagacgcgttctcgtcctgtggacctcatcctccatctccgcttcttcttccttcttctcctctttattcttgtcagtatgaagctccgcctgaaaccctgctctctctacttttctgatgatctcttcatcagacagcgcctgttcgtcaaatgtgatcgtcagtatgccggtcgtcagattgacactgcttcgcgtgacacctgaaagcttccccgtgaccctctcgaccgcactggagcaggctgcacagctcataccacctatattaaactgctttgtgatcatataagcacctccatctatacccctgttgggtattttgattatacctccatacggtatatttgtcaacggggaaatctacgggatcactctatttgccatccacagtaaaagagaccggaactaccgcggttaaagcggcagttccggtctcttctcacgcttatgagcagagcggatacttttccgtaagccctgacacaagctcttttgcttttcctatattatcttcgctttttatgacaagtgcgatcgcttccgcaatgacatccatgtcagcttccttcatccctctcgtcgtcaccgccggtgttcccagtcttactccactcgtcacaaacggagagcggggatcatttggaatggtatttttgttgcacgtgatatgtgcctcatcaagacgcctctccagctctttacctgtaacttcttctgtgcttaagtccacgagcatgagatggttgtccgtacctccggatacgatctttacccctctgtccataagccctttgcagagagcctgggcattgtcaatgatctgctgctgatattctttgaattccggcttaagcgcctccttgaagcagactgcctttcctgcgatcacatgttccagcggcccgccctgcgttcccgggaatatggctttgtcaaagtgaaacttctcctctgcttctctgttgctgaggatcataccgccccttggcccgcgcagtgttttgtgtgttgtcgtcgtcaccacatcagcatacggtatcgggcttggatgaagtcccgccgccacaagtccggctatgtgagccatatccaccatcaggtatgcacccgcttcatcggcgatctcccggaactttttaaaatctatgatcctcgcatatgcgctggctcctgcaatgataagcttcggtctctcacggagcgcgatctcccgtacttcgtcataatcgataacaccgtcatcgttcacgccgtaagatacaatatcaaaatactttccggaaaaattcaccggtgaaccgtgcgtcaggtgtcctccatggtcgagattcattccaagcaccttatcgccgggatccaccattgcaaaatataccgccagattagcctgcgctccggaatgaggctgtacattcacataatcgcagccgaacagctttttcgcccgctcccgcgccagatcttccaccacatctacgcactggcatccgccgtaataacgcttccccggatacccttccgcatacttgttcgtaaggggacttcccatggctgccatcacagccttgctcacccagttctcagaagcgatcagctcgatgtgggaattctgccgctccatctctgaacggatggcttctgctatttcactgtctgctttcttaatttcgtcaaatgtatacatgttcgtacctcccaggcaattgccgcatctttacgttacctacaggtacattatatcattattgcgtacttgttccaagggttacttctacactgctttctttatactctccgctcttgtccggagtctgcacagtaagtgttaccttctctcccgctttataatactgaagctgttctttcagcgtatccatactgttgatcgtcgtgccgtcaagcccggtgatgatgcttccctttgccagccctgccttttcagctccgccgccatttacaactttcgatatatagacgccggtcggcatattgtacatttgagcgctttcggtgttgacatccacaccttcaattccaagatagccctgctcaccttccgccaccttcgtccgtgtttctttattcatcagattctggataatgctgctcgcatcagatatcggtatcgcgtaacccataccttccaccgtgtcggtggctaccttgatcgagttgataccgatgacttcaccgttggcgttgagaagcgcgccgccgctgttgcccggattgatggcagcgtccgtctggatcagttcaccgtcgtaagtatcaagttctctgttcgtcgcagaaataattcccgttgtcacagactggccgtaaccgagcgcattgccgatcgcgatggcaggttccccgaccttgagcttcgtggaatctccgagcgtcgccactgcgatggcgtccatcgtagaactcttgatggaatcaaggggcactgcgatcaccgcaagatccttcgccgcgtctgtaccttttacattggcctccacactctcttcatcgataaaagatacggtaagtgtattgctcccttccactacatgattattcgtcacgatgagaagttcgtcgtcattttgtcctacgatgatgccggaaccaacgctcttgctttcctgctcctgcacgccgccgaagaaattctgcacctgctgcacactcatgtttgtgatcgatactacagacggcattgctttgtcggctatatccgcaatatcagaatttacagtgctgttcgttgttgtgttaagctttgtgcttccgacggttgaagtctgctttgccgtctttttgccgcccgtaccgaagaccttatctcccacgacattgctcgtctggaacgcggcgcttgccacaagaccgaagacaagcgcggaacatacgagcttcacccacttcggcgccgtcttcttcacccgcgttggcttaccgtcaaacccgccggccggcccattcatattctcctgttccggattataataattatattgattgtccatatataagactcctttcatttttaattgtcatatgaacagttctgtttaactgtttctgtatgtagtgtactgtgtaattgtgttcaatctgtgataaaatcatgagaaaatcgttaaatgtcaaaaaaagagaggaaatccgcttcccggattttctctctttcaaatctgcagtcatgtcagggacattttacggctgcgcctcctccagaaatcttcttatctcactctcttttcccacgagagacccctgcaccatctccggttttccgccgccttttccggagaacctgtcgttcagctctctgcagagctgccgcacatcctctgttctgctgccgatgacgtaacggtacccttcttcgtccgtccccgccagcaccgcacatacacgcgcgcccctgtcaagcagcaggttcataagctctctcggcccgtttccggacagttccggatcaaacactgcagcaactgttccgtccgtactgatctctgccgccttatatgtgagcatcttctgctgaagggaagcgatctttcctttctggcggacctgttcttctttcagatgcccgacagcctccgcagtctcttcctccctggcacagagaagcgctgatatcgcctttacattgcattctttctgccggtagtctctgagcgcccggaaaccgcacagcatgctgatgcgctctccgcctttataattcaccatatctgtcagcttgataaggccgatctccccggtcttatccatatgaggcgcgcagcacgcacagacatcataacctggcacggtcacgatacgcacctgcccctcgatctcgatcttgcttctgtaatctatgctctccagttccttttttgaaggataagatacctggatgtccaggttccggaacacagcttcattcgccatcgtctcgatcccgcacagttcctcccgcgtgatcgggccgttaaagtcaagcgtgcagtaatcactcccgagatggaaccctacattgtcatagccgaacttttggtggatgagcccggagacgatatgttctcctgagtgctgctgcatcttctcaaaccgctcgtcccagtcgatcgtccccttcacttttgttcccggtacgagaggcccgccggccgtgtgaaagataacgccctctttttcgtgtgcatccgtgaccctcacaccgccgatccatccggtatccgcatactggccgccgccttccgggaaaaatgccgtctcgtcaagcacgatcttatactgctccccgaatggttcgcacgccagcacttccgcctcaaattctctcatatggctgtcttcataaaataactttcgtgtcatcttatccaccctctcctacattctctccggggcctcaaagcctagcagatcaatgcacgcttccagcacccgcttcgtgagtacaagcagagcgatgcagctgctttttctgttctcatcctcctgcgcgagtatcttagtctcgtggtaaaaacggttgaacacatttgccaggtcatagatgtaggcacagattttgtgcggcgccagttcctcgaacgcggtctggatcacttcactgtatctggcggcctccagcatcagcgccttctcactctccgagcaggccccttgcattttgatcccgctgagcgtaccgccgttttcctcatatttgttcaggatcgatttgatccgcacgatcgtgtataggatatacggccctgtatttccctcaaaggaagtaaacctgtccacatcgaacacatagtcctttgatgcctggttggacagatctccgtatttgatggcggacatgccgactgtcttcgctgtctgcgccgcattttcctccgatacggtacggttatcggatatcttcttatacatttcttcctcgatctccgcgatcaggttttcaaggcgcatgacaccgccttctctcgttttgaacggctttccgtccttcccgttcatcgtgccgaacccgagaaaccgaagcttcgtttcttccgggacgatccccgctttttttgcggcgcggaatatctggacaaaatgcagttcctgccgcttgtccactacatatatgatctcatccggatgataatcctcttccctctgaacaagcgtcgcgaggtctgtcgttccatagagggaagctccgtccgacttctggatcatacacggaggcacctccttcgtgtcggtctcctcctgcacgtcgatcacaagcgcgccgtcgtccatatgggcgtacccttcttctttcagccgtctcagcatatcagggatatatttctgggcgtccgcttctcccttccacaggtcaaagcagactccgaggttttcataattcttcttcaaatctgccacggatacattcatgatatgattccatatggctgtatatcccctgtgcccgttctgcagaagatatgttgcgtttaatgcctgctcacggtaagcctcatcctcctttgccctgccgctggcagtcggatatatctcttcgagttcggagatggtaaacggcgcgtcctccgggtactccccgtcaaagctgtcatcaaagtaaggaagttccggcctgcggctcttaagctctgtgatgataagacccatctggtatccccagtcaccgagatggatatccccgagcacctcatgtcccatcgctcttgcgatacgtttcaggctttcgccgatgatcgccgagcgcaggtggccgacatggagcggcttggccacgttcggtccgccgtaatcgacgatgatcatcttcggttcttcggccctggaaagtccgagtgcatgatcctcattcatcccgttcagataatcagccacaaacgactccttcagccggatattgataaagcccgggttcacagcctccgcttcctttatacatgcgctctttgccagatttgcagtcacttcgccggcgatcactgcgggcgctttcctgtacgtctttgcaccggccatagccccgttacactggtattcacacagatcgggacggttggacagcgttactttggcatacgctctgtcataacccgctttctcgaacgcttcctccatctccttctctatgagatcaataattttctccatttttgctcctccttgcatatatggcttctatataagaaaaacttgaatataacgtattttacctagttattctatcataaggaaagtgctgcaacaaccttattttaaatctgctgttgcaaaaccttccacaacatggtattatatcaataacaattactattattgaattcaaggaggtcatcatatgaacaaaaatgtatttcgcaacttatcctacggcgtctatatcatatctacactggacggggaacgcggcacaggctgtgtcgccaacagcatcatgcagatcacgtcagaaccggccactatcgcgctcagcatgaaccatgacaactttaccaattcctgcatcgccgcaagcggtaaattcgcagtatctatactgtcagagacatctgcttcttccctcatcggccagtttggtttccagtgcggcaaagatgtggataagtttgactgcgtcggctttaccgtaaaagaaggacttcccgtcatcgacgactcctgcggctatattgtctgtaacgtcattgacacgatggaaacctccactcacaccgtttttctcggcgaggtcatagacggggacattctcggagacgctccggccatgacctatgcatattaccataatgtcgtaaaaggaaagagtccgaaaaacgcacccacctatcttccggaagacaaggaagaatccggcgatggcgaaaaatgggtgtgcagcgtatgcggctatgtctacgacggtccgacgccctttgaagagcttccggattcctacaaatgtccggtctgcggccagggaaaagacaagttttgcagacagggataaatgagtaaaaagagaggtatacaacagtgataaaattaggttcccacgtcagcatgagcggaaaagacatgctgctcggctctgcaaaagaggcggcttcctacggcgccgatacttttatggtctttaccggggcgccacagaacacaaagcgaaaagacataagcgaactcaatatcgaccccgcctgggattatatggacagtcataatataagcgatatcatcatccacgcgccgtacatcatcaatctgggcaatactgtcaatgagcggacatacgaactggccgtagaatttctccgtatggatcttatgcgcagcgccgcctgcaggagcaggactctcgtcctccatccgggcgcccatgtcggcgagggtgcggacaaaggcatcgcgcagatcgtaaaggggctcaatggaatactgacgcctgagacgcctgtcaatatcgcacttgagacgatggccggcaaaggctctgagatcggccgcacgtttgaagaactggcacgcatctatgacggcgttgtctgcagcgataaactaagagtatgttttgacacatgccatacacatgacagcggatatgatatcgttcatgattttgacggcgtcatggagcacttcgacaaagtgatcggcaaagaccagatcgctgtatttcacatcaatgacagccgtaatacgcagggtgcgggaaaagacaggcatacgaatatcggaagcggagagatcggttttgatgcgctctcctacattgtgcaccatcctgattttctccatgtgccgaagatactggagacaccgtatatcccgtctctcgaaaacccgaaaaaaacttatccgccctacaggcatgaactggccatgctccgggcaggcagattcgatccccatcttgaagaaaatgtgcggaatgactacgaacacgagcgtgttcagtgaccgtttttttgtaaaataacatacgatcccggcagaaattttgtatctgccgggattttatgttgttttatataccaatcttccacattcacttgacatttccctctttttgtactattgtattacatagataatacaataatgttatccttagaaacgaggtgattacatgccatgggatttagataacggacgccccatctacctgcagcttatggaaaagatccagcaggatatcatatcgggcatatataaaccgggtgataaactcccgtcggtgcgggatcttgcactggatgccgccgttaatccgaacacaatgcagaaggcactgtccgagctggaacgcagcgggctggtttattcccagagaacaagcggacgctttataacggaggatgagagaatgctgaaacagatgaaaacagaactggcctcagaacatatcagagatttttttgaaaaaatgaaacagcttggctttcaggaggatgaaactcttctgttgatccaggatgcactaaagggggaacactaatatgaatccaattttggaatgccacggtctttccaaaagatacggcaataacttctatgccctgaacaatctgaacctctctgttgagcgcggacagatcgtgggactgcttgggccgaacggaagcggaaagaccacttttatcaagcttataaacgatattctcgtgcctacttccggaaagatattgatagacggaaaggaaccgggcgtagagactaagaagatcgtatcctatcttccagaccgtatccatctggacgactccatgaagataaaggacatgatcgcttattataccgacttttacagcgactttgtaacagacagggcataccgtatgctcaccgaccttgagatagacgtcaacaagcggctgaaaaccttctcaaaaggcacgaaggaaaaagtccagctcgtactcgccatgagccgcgatgcccagctctatgttctcgatgaaccgatcggcggagtggatccggcggcaagagactatatactgcagacgatactgagtaactacaatgaaaatgcaacagttgtcatatctacgcatttgatccacgatattgaaaatatactggaccgtgtcatatttatccgtcagggccagctcgtactcaacgccacagtagatgagatacgtacagaccaaggcaaatccgtggatgcgctgttcagggaggtgttcagatgttaggaaaactgatcaaatatgacttgaaagcactgaaccggtttctggtcatcatacatgcttttctcatactgtccgcgctggcgggaaggtttttcctcacgagccggatccagtttacagaagtgtctgacacgacatcgctcatgatgatgctttgctttacgctctatttccttatcgtggccggagttgtgtttggaaccgagatgataatcgccgtcaagttctataaaaacctgttctcaaacgaaggatacttaagccgtacgctgccggtgacgccaggccagcatctgctcgccaagaccatcgccgggactgtctggtgcatcatagacgttgtgcttatcttcctgtcactgtggatcgtgatcatgacaccgtccgtcacatccgcatataacgcaaacaaagccgaaatactggatcagcttgggatcaccggggatatcacccctgcattccttattggctctctcgttcttatcgtgctcatcggagctgtcagcagtgtggtcatgatatacgcttccatcgcaatggggcagctcttttcaaaccacaggatactgggggccgtcgtctcttacttcatcataacgactgtcctatccatcttcagcctgctcgtcatgacagtcaccggattcttctcccggtacatgccggcagcatcgcagaacggaacacttgattttaactttgccgagtatatgatatatctctgtaaagtaacagtgggactttccattgtcacatccattctgctttatatttttacgtattacattctcagaaagaaaacgaacctgcagtaaaatgcggcaaaaagccatctctgcccgaaagtatacggaagagatggcttttttacgttctacagcaaactatacggtatgaaaggactctaaaacacagcctggataagaaacatatataaaatagtcccggctccgatgctgagcagattgttgcgcttccacacgtgaagtcccgccgtcacgatgacagccagagcctccggtacgccgtgaggttctgccagtacaggggtcgttctcaggcagtacacgacgagcattccgatgaccgcaggtgtgagcaccttgccgagatactgtacgacacgcggtatctccttccccttcggaaacaggagaaaaggaacgacacgcgtcgcaaaggtcgtgcccgcaacggcaagaatgatgagaaatgacatggtcacacttatgggcattgtacttcctccctcctctcaagtcttgtgcgcatcataaacagaacaagaacgatgagcagcatggacggcagcacaaacttatccgcgccgaatatctgaaggcagataaaagcagccgcaattccgacgaccgcaggtgtcctgttccttctgtccatccactgttccacaaatatcacgacaaacagcgccgtcatggcaaagtcgatcccctccgaattaaaaggcagaaggctgccggccaggccgcctatggcagaaccgatgatccagtatgactggtccatgagagagatggcaaacaggaacttctcttcttccacgccgtccggcacctttgtcgtacagagaagagaatacgtttcatctgtaaggccaaagatcatgtaccagcgctttttccccatattgttgaacttttccaggagggaaatgccataaaaaatatggcgtacattgaccatcagcgtcataaaaatgacctggagaaacgaaatacccggcacgaaaaagttcaccgccagatattgtcccgaacctgcatatacgagcagactcatgagcactgcccacaaaaaagaataccctttttccgcatacataactccaaacgcaattccgataaagatatatcctgtcataaccggaatcgtatatggaaatgcctttttaaatgccttcctgtaacccgacatcttccctcatcccatcctttgtattttttaaaaaatcagacctctggagatacagaggtctggcttaacttacactattcattactgcttgtcccggtagaatcttcgtatgcattcttcagatctgccaatgcttccctgagcagtgcgtcagattcaacggcgctttgatactgcgcggacgtctcatccagcagctttttcacatcatcctggccggccacttcacggacagagttcttcagctccttgtcctccacagactggctcacgtgatatttgccgctctctttgtttttttccacatacagcgtgcctaatcccggaacacccgtgtagatatcttttatcttcatatcatatttgacaaatgccacatatgaatccttgtattttcctaattttgtatagacctgtacattgtcgtaggactcgacaaaatccgaattttctgccagacgcgcgtagtacgatttcaccacatctgtcacttccgggtactcttccagtctcagcggatttgtctctatgctgtcatatcctttgttttccgctttgatatcctgggaacttgtcttttgtgctttctggactttctcttccgtaagattgaacccaaccacaccgagcgccagcacgagcagcataacggctatgataatattagccctcctgtacttcttaagccggccggagcagtctttccatcttgctttcataagactccctccattgtaagcacttttttaagtacacacccgggcggattcgaaccgccgctcccgcctccggagggcggtgctctatcccctgagctacgggtgcataatttgtcctatatgaaattgcctttgtaatattatcatatttccttcataaagtaaaggaaatatcttcgacaaaatgaaaagtttatatgtattccatcttctcaaagtagcgcatcagtatatccgcgcagttttccacacccagatcggaagtgttcagtatcatatggtagttgttgacatctccccacgccttgcccgtatgttcatgataatacagggcgcgctcctcatctgtccgctctaccttctctttcgcttcctcataggtgatgctgtctttctccatgatccgctgtatcctgtcctctttatccgcgcacacgtagatattgaacacattctttctgtcttttaatatctcggatgcacagcgcccgagaatgatacacggcttctcagccagctccctgatcacttccacctcagattcatagatattcttatacagttcctgttccacgttgaccttgtcatatacaggtattccgatcctctcggagagttgttgcgcaatgatgctcgcccctgtcccgtatcgacggctcatagttattaccagtttcataccgattcctccttagcagtgcagattgtgaacagttttattatagcaccttgccggcaaaaagggtatcctcttttgtaaacttaatatttcagcccctccaggtcttcccccggataaacgatcttctgaacatacgcctccgtgatctcccatatattgccgcacacattaaagatcgtccagttgtcgatctcaaagacgcgcttccagctttccacaatacgccgttcttcctccggatacatgcccttgtagcgcccctcaaagaattcaaacccgttggatatgccgagaagcttaagatgctctctgtaagacgccgcatcctgctcatctttcggcagatatatccgattgagcacataatcccattttgcctcatcaaaatatatgaccttttccttcggcacttcgagcacatacacgacggtgccgtcgatcggcttcagacagttttccgcactgatggaacaccagatgggagctttcacatcctccggtttcggcaccctgcgggccgcctctttcgtaaaccagtcatagctttcgagaaacaggggcgcgatatcaccaaaatgcatctccacatatattctctggttgataatgcgcccctgcctcttcagcggaagcagcgtcttgtcgttctgcctcgtatataacctgactgtatcctgtcccattccatcaccctccttttgttttattctaacatccggagcggccgctgaaaaggaacatatgttttactcctgaagttttttcaatttccggtcataataatatgcattatctgacagcacatcctcttcttccacctgcgtcgcgttgatctccgccaccatatttgcaagttcgctcttgcccggcgcttcgctctccggtatgatgatcatctcgtggatactgcttggaagtacataatagttttctttcagatgatctcccacgcggccgagcacgccgtcatacatgaccaccgcggcgccgaaacttctcagtgtattgctcagcacgtacataacgtccctccccggcatctcccggcttccgtcaagctccgctatcacttctttcatcgtcttgaattcgcatggaagaagccgttttgtgttgcggcatgcctgccggtatatgtcctcccgggtcacattccaccctttcaaatgttcctttctgaccatcattgccgcagtaccgtaggcattcacttcaagcagcacataaaataccgcggccatgtcgagatatggttcaaacggtgcgtccgtcagcattgttttatttttttccttattgataagacggtatacgatcttttcttttacggattcatagctgcgcagctcatctttttcccaggaatggctgaaacgcacctcattgtagagtctcactatatccgcggcgatctcttccagtgtcccgccgttcaggaattgttcatagtattcttccagatatatggcgggcgatatattgactccctgcctcgtcagcatgattccttttctctctcttccgttattcttgactgctgtgtggatacacaccgccgtaccggcgccgcactctccgctcacttttcttttgacatcctgcacaaactgatcgtaattcatatgactcctttctttgtgcagcagtattgtgttggctgttttttcggatatccggcagaatatgcctggatcagtccggtctctgtgcccggtctgtatgaatatattgaaaactaaatggacgggccgtatgatacagccctgaaatattatggtacatctattataaaaaagccctgcataaattgcaaggctttctttcatgttcttttattgcggacgggccgatgactatatatgatacatagtccctggcctggcagaattctgcagcagagactatactctggacagatattctcctgtacgtgtgtcgatcttcagcttgtctccctgctctacaaacagaggtaccataacctgggcgcctgtctcgacaatagccggcttagtagctccctgagccgtgtcgcccttgaatccgggctccgtctcgatgatatcaagctcaaccgtgatcggaggctcgatcgaaaatacattgccctgataagagataacttttacattctcgttttcttttacaaatttaagtgactctcctactgtgtccgcgttaacggcgatctggtcatatgtctctacatccatgaaatagaaaagatcactgtctgaatagagatactgcatctctttcctgtcaatatgtgcctgttcaaacttctctgtcggacggaatgtcttctcgacgacccctccgttaatgatatttttcatcttcgtacgtacgaaggcggctccctttcctggctttacgtgctgaaactccaggatctggaaaatattcccctcgatctctacggtcaaaccgttcttaaaatcacctgctgataccatgaataatcctccttaaaacggtgcgcctaacgcacctgacgttctttttcacttttctaattctataatacattctgccttttttcaacctttttttacctgttcaggctcttcttataaaagtgcagcactattttttccagacggcgcttcaacacgatctggatctcctctttcggatggatcggttttacgagtatgttggggatccctgcccgctttgccccccacacatcggtgaaaagctggtctccgataaatactgtattttccggtccggtacccatgatctccatggctttcctgtagttttttgcggacggtttgtgggcattataaatatagtccacctggatattcctgttgaacatcttaaccctcggctcctgattgttcgagatgagacagcagccaaatccgatcttcttaagttttgcgaacagttcttccgcccgctcatccgccggcgccccgtggggtacgagcgtattgtcaatgtcaaagataaggcccctgactccttcgctgtacagtttttcaaaatctatgacataggcagacgtcacatatctgtccggataaaatttatcaaacattatttgtcttccatttccgtaacgcgctgtacaagttcttcgcatatctgaagcacgtttttattgtctgtgttgatcacgatgtccgcggccgcctcatacttctcgcggcgctgctccatcagttcggagatgccttctacgttctttcgtccgttgagcaccggcctgtcatcgctgtctttcacacgctcatagatagtctcagggctggcagtgagaagcacgactctgccgttcttcttcatctcagcgacattgcgttccctgagcgccgctccgccgccgcaggagatcacggtgttttttctggactgcatctctatgagcagatttgtctccagatttctgaaatattcttccccgtatgtggcaaatatatccgggatactcatttcttccctgtctgcgatcacctggtccatctctacgatgtccatggcaaacatggtgctcagataatccgacaccgtcgttttgcctgctcccataaatccgatgagcacaatattgtaatcaaacagttttcttgcctggatcctcttgctgttcttcaggatacaccggaacacatcatagatctcatccttatacttattgtccgtcagtttttcttccaggcgctgcttctgcttcgcctcctgctgaggctgcagaatcggcattccgtatgtctctttgtacgccatgattttttctataacggcattccgctctaccaatgcgtcaataagtttatcatcgcacagtgccagctgctctctgtacatctctaaatcattcatatttttctttctctcctgttttatactgatccgctttcacaccggtatattataacaactttcccggcacagcgcaacaattatggtttattttttcaggctgtagtagtcttttacgtactctgtgaacgcctttgcgacaggcacctgatacttgtttttcagcgtcaccatatagatgaagcgccggtagtccagatcctcgatctccaggaaagacgccttcatgctgcgcactgtggcggcgtccggaacgatgccgacgccgaagcctctggccacaagccctaccatggcgctgtcctcatccaccgtatagacgatatccggcttgatgccgtaatctttgaatatctggcttatgacgccgcgcagtccgcttcctctgttaaagaaaatctgcggatacgacgctatttcctcaaatctcacactctttttttcggccagcggatgttccggcggtacggcggcgatcagcttctcctgggacaccgggacaaaatccagctctttttcgcctgtcaccatggaacagaaaccgatatcatacttttcctctttcacaccttccacaatttcctttgtgactccgttgctgaaaccaaactccacttttttatccctgtttgcttccagaaaaccggaaatgacctccgggataaactcgcttccctgcgtatatatgtaaccgatgtcaaccttcccgcttctttcgctcgtcatagcccttgtcttcttgatccccgcatcgaggatatcgagagcttcctcggcatactccataaacagcctcccgtatttggtgagggctacgtttcttccctgccgttcaaacaggctcgtgccaagttcctcctccagtgacgatatggcatggctcaggctcggctgggtgatcgacagtttctgggctgcatttgtataatgctccatatgtgcaagtgttacaaagtagtgcaattgatttaaattcataatctgcctcctttgtctattttttacaatcataccacaatccatagaacaaatctatcaaacagtgcaaaaacatgaatttgttttatctttaacaatatcttataatccaactatagaacagctttgaacgatattttatcaaatggaggatgttacgatgaaaaataactttaagcacttgttttcccctctgacggtcagggggatgacgatgaaaaaccgcgttgtcatgatgccgatggggagtaatttcgcgggacacgacggggaactgagcgatgagcacatcacatattatgaactgcgggcaaagggcggtacgggacttatcattgtggagaatatctgcgtaaaatacccggagggttccaacgggacaacgcagctgcgcatagacaaggactgttatatcccccggctttacaaacttacggaagcctgtcacaggcacggcgcctgtatgggaatacagctcaaccacgcaggcgcttcggccatgtcgtcccggacggggatgcagcctgtatcctcttctgtcctgccgtccaaaccgggcggagagcttccccggccgctgtcaaaggaagaacttgaaggcatagccgcagattacggcgccgcggcaaggcgcgccgtcaacgcggggtttgacctcgtggagatccacgcggggcactcctacctgatcagccagtttctctcaccgacgatgaatgacagaacggatgaattcggaggctgtgcagaaaacagagcccgtttctgcaaaatggtcatcggggaagtgcgtgccgcggtcggaccgcgcgtacccatctctctgcgcctgagcgtggatgagctggtcgaaggcggcaatacgctggaagactgccttgcataccttgagtatctgaatgatgaggcagatatcttcgacacttccgctgcgttgaacccttctatccagtatcagatcgatgccaattacctagcggacggctggcgttcctacatggccagagcggtgcgggagaagtttcacaagccggccatcgccatcggcaacatccgcagcccgcaggctgccgaggatattctggaaaagggggacgctgaccttatcggtatcgggcgcggtcttatcgccgaccccgactggtgtgccaaggcggcccggggcgacgtgtgcgatatccgcaagtgtatttcctgcaatataggctgcgtcggcaaccgcatcggcggcaacagaccgctgcgctgtacgataaacccggacataattggaggagaggcctataaaaagcggaacatatcaaagccatgccgtgtcgttgtcgtcggcgccggcaccgcggggctcgaagcggcatgtaccgccgccgagaccggctgtaccgtaacgcttcttgaaaagcaggaccacataggcggactatccgtggagatctcaaagattccggccaagaaacggcttgccgattttccggactatctgaaacaccgcgcggccggacttgacaatctgacgatcagaacaggcgtcgacgcgacagcccatactgtcaaaagtctccgcccggaccttgtagtgaacgcgaccggctccgtcccccttcttccgcccattaccggcctgcatgaaagccttgcggacgaaaaagcggatgtgtactcgattctcgacctgatacagaatatagaccgctatccagaagacatgtccggccgtaaggtcatcgtgatcggcggcggcgccgtcggccttgacgtggtcgagttcttcgccccgcgcggcgcggacacgacgatcatagagatgatgcctttcatcggaaacgggctggacgcctcctccacctcctcgatgaaagaatgcatggaaaagcacagcgtgacacagctggtcaacactgcgctcaaaaaagtaacccctcattccttcctcgtggaaaaagacggaaaggaagaggaactcccatttgattacggtttcgtctgcctcggcatgaaggcacacgcgcccatctgggatgaactcacaaaagcctttgacggagaagacaccgcccttctcaatatcggagactccgtccgcgccagaaggatcatcgacggcaccgacgcaggaaggcatatggtactgaacacattagaacagctcggatacttataaacgaatcggggacaggttaaatttaattggggacggggtttttttcaaaaaaccccgtccccaattaaatttaacctgtccccgaaggagctggtattttcttttttacttatcttccagcactttttccgtgaatgccttgagttccatacttccgatatcaccttcatcgcgttttcttacggatacgacattctccgccacttctttttcccctacgattatcatataaggtactttctgcatctgtgcctcgcggatcttgtaaccgagtttctcgcttctgccgtcaagttccacacggatcccggcttccttgagttcgtctgtcaccttctgtgcgtaatcggcaaacttgtctgatacgggcagtatcttcacctgtaccggcgcgagccatgtcgggaacttgcccgcgtaatgttcgattagtataccgataaagcgctcgatggaaccgaaggcaacccggtgtatcatgatcggtctgtgcttctcgccgtctgcgcctgtgtattccagttcaaatctctgcggcatctggaagtcgagctgaatggtaccacactgccatgtccttccgatggagtcttccagatggaagtcgatcttcgggccgtagaacgcgccgtcgccttcgtttaccacatagtccattccgagttcttccagcgcccctctcaggccttccgtcgccatctcccagtctgcgtcgcttcccatgctgttctccggtctcgtggacagttccacatggtatttgaatccaaacttggagtacacttcatcgatcagccttgccacgcctttgatctcatctcttatctgatcctctgtcataaagatatgggcatcgtcctgtgtgaagcagcgcacgcgcataaggccgtgaagctggcctgacttttcatggcggtgtacgaggccaagctcgcccacacgcatcggcaggtctttataggaacgcggctccaccttgtacacaagcattccgcccgggcagttcatcggcttaactgcataatcctcctcatcgatcactgttgtatacatattgtctttatagtggtcccaatgcccggaattctcccacagatgcctggacagaataatgggcgtggagatctccacatatccttctctcagatggagctgccgccagtagtcgataagcagattcttcagcaccattccttttgggaggaaaaacggaaatcccgggccctcatccatgatcgcaaacagtcccagttccttaccgagctttctgtgatcgcgcagacgtgcttcctccattctcttaagatatgcatccagctcgtccgccttcgggaaggatgtcccgtagatcctcgtcagcatctgattgttctcatctccgtgccagtatgcccccgccacgctctgaagcttaaacgctttgatcacgctcgtgttggacacatgagggcccgcacagaaatccacgaactcaccctgtctgtaaagactgatctcttcctcctttggcagagcctggatcatctctactttgtaggattctccccgctcctccatcagcttcagcgcttcctcacggctcacgacacttctctcaagcggcagagattccttgacgatcctgcgcatctctttctccacctcggcaaggtgctctgtcgtaaacggaaaactgaattcaaaatcatagtaatatccatcttttaccgccggtcctatagccagctttgtatccgggtacaggcgctttactgcctgggccagaatatgggatgtcgtatggcggaacgcctcctgtcccacctcatctgcaaatgtcaggtcctgtacagacccgtctttcatacttactttcatcttgtttcgctcctttcaatatacactttttgttcttttcagaaacggtatttcctgaatcaaaaaaacaccctaaacagacaacttgcgctgtccatttaagggtgcatctaacgctgcacggtcccaccttaacttttcacttcagactctctcaaatcctatcccttaacgcaggaatacggcaatgcttactgtcgtttcggcaccgcagctcaggaatggttttcatcttctttctgtcacaaaaaacttccaccaaatgtttttctctctggatgactccaaaagactactcttttccgtctctgcttttgtcatgtttccactgtaataccagctatctttcattatagcaacacacggcaaaaagtcaacgcattttccgattattttttgatcgcctcctgcacatctgccctgaactggttccatgcgtcctcattttccacaaaatacttcggacagttcttttccgtcacatcataatgccggatgacatccttgctgtccaggtcaaacttcttacacagccaggcggtgagccggaccatggacttatatgtctcctcgttgaactttcccgtctcatccgggtgacagcactcaatggatacggtgtcattgttcctgctgttggacgcataagccacctcccacgttggaacacactgcacgatctccccgtcaaggcctacgataaaattactgctcgcttttgtctcatgactgtccttaaggccctcaaaataattccggttttccatggcggtggcgcctggattggccgtgtaatgcacaacgatccctttgatcttatccgtcttcgtccccggccgggaataggggttttccgtgagcagttccacatccaggtccgggcgggaggcatctatgtcctttcctttaagttctatgtaatcattcgtgaaccatgctggcttgatgatccttacgatccccacgagcacaatgagtacggcaagcacgagcacaccgagccggatattgcgctggatcctcctcctgcgccttgcttccgctattcttctgtccatactatctctccaatcattccatactattctagcatagttaagagaaatattttatgaaaaaatacttatgaatttctgaatgttaaaactcgaatttatacgaagttactgactcaaactgccctcccgcacggacgaccggactttcaaaattatctttatttaccgcgtccgggaaatactgcgtctcaaagcatataccctgatgttttccgtacactgctccggcctttccccgctcccggtcaagaaaattgccgctgtacacctgcattcccggcaaatctgtaaatatctgcatcctgataccgctctcccagcatgaaaattcacctgtcctgcggtacccgtctccgcccagcacccagttgtggtcataaccacccgcaaaatccagcgcctcgtaatcggcgcctatgtctctgccgatcgtctttctgacgcggaaatccatgggcgtcccctccacacttacgatctcgccggtagggatggattcttcgtcagcgcgcgtatatgcctctgcgtccagccacagctcctgttccagaatatcgcccgagtcatggccgttcagattaaaatagctgtgattcgtcaaatttacgatcgtgtccgcctctgccgccgcctcgtagcggatctcaagcgcattttcgccgttcaggctgtacgttaccgtgacatccagcgcgcccggatatccctggtctttgtccgggcttgacagatgaagcgccacatgtctttcatccgcctcccgcacttcccacagcctgtggttgtaagtgtcaggcccgctgtgcagattgttgccgttgtcattttcagcaagcgtatatgtctttccgttcagcgtaaaccgggcgccgccgatacggttagccacccttcccaccgtcccgccgaacgactgccctccggcttcataatcccgggcgcagtcataaccgagcaccacatccctcacctgcccgtcccggcacggtatgcgcaccgatacgactgctgcaccgtagtcactgatacagacggtcattccgttcttatttctcagttcatatacacttgcctgctctcctgcctctgttgttccaaaatcacgtaccatcccaatatcctcctgtccgctcctatgcgtattttctgcttattttgtagttccattctttttctcgatcgtaaaactgacttccagcggcctgtcggacggtatgagatacggtccgtgcaccggcgccccccagctgtcgtcgcccccgacccccatctgagccgccagcacccgaagccatgtatagtgcgggcgcggcaattcctccctgtgagacgcggcctccagctcgtaagcgctgtacggcagcacactgtgctcgaaaggtctcctgtccccggatatcctgagtccggcgccgctgtcatcggtcacttcgacccatctcgtcccggcgcggttaccgcattcctgcggaatcagataaccggacaaattcccggatgccgtataggtataaacaccaagcctggccccttccatgcggtctatatagttctcctccggaccaaacccgtaatatcttacattatgacagcgctccttcagcttcatctccagcccgaatgccggcaggaccggaaggccgggcgctccttcatagcggacacggacctgtatcctcccgtcccccgaggccgtataagacacataattttcagatgcaggtacggtaggaattataaatgcaaacgttaccgttacttcgccttccgcctcctccacgttcacatctttcactttctggaacaatcccgccgccatccactgactgcagtcatatccatgctttgctccccggtcattgtccgtgcaggctctccagaatgtagtccttggcgccctcgttatatactcggcgccgtcatagcacagagacgccagtccgccctccactttggagaacatggccgaaaatccttctcccctgacgccgatattcacatctccatggatgatctccagtggatatacctgtttgccggcgcacttctttccctcatggatatactgcgcagaacagagctcatatcctgcttgggcccattttgtatcgtttagcagatgcatggagacttgtaccacacattcttctccgctctcctctgcctgccgcatgaccagttccggcagcgtaacggtctcggccgtaaggggcgctgtctttatctccagctctttgcacagaagctccctgtcttcctgaaagatttttaataaaaatatatattcctctgcggaacgaaacaggctgcggtttttaacagtcaggctgtctttcccaagctccagctttatatccgaatagagcgcctttacctcctgggctttcggcgatatgctccggtctgcatacacgatgccgttggcgcagaactcatagtccgtggctctgtcgtcatggtcgcctccataggcaaatacttcttctccctgctcatttaccataagaagcgactggtcgatgtaatcccagataaacccgccctggtaagcctcatatttttcctcaagatctgtgtacagtttcaggccccccagcgagttgcccatggcatgcatgtactcacagcttatgtacggcttgcctgtctttttttccagatactgttcgatctcttccggcttggcgtacatccggctctccatgtcacttatgtggtcatacttccggttccagaatactccttcatagtggacaagcctcgtctcatcccgcgaccggaagaacgcggccatagcttcgatgcctgtcccggcataagattcattgccgcacgaccagataagtatactcgggtggtttttgtcccgctcgaacatggagcgggcgcggtccaccaccgccgctctccactccggccggtctccgggcacattccatgacggatcgcacgtaccaagcttctgccatgaaccgtgactctcaagatttgcttcgtctatgagatatatgccatattcgtcacacaattcataccagtaactgtcgttcggataatgggatgtccgcacggcattgatgttatgcctcttcataaaacggatgtcccagagcatatcctccctcgtgacggcccttcccctcttcgcattaaactcatgccggttgatccccctgaatacgatgcgccgtccgttgatacacataatgccgtttttcatctcaaaccgccggaacccggccttctgcggaactgcctcgatcacttctccggtccggtctttcagatacacatatacatcataaagatacggctcctccgcactccagcagcgcacctttccgggagataccgagaaatgtatgtcacgtgctcccggctgcactgcacgcgcgatctcacgccccctgtcatccttaagcacaaactccgcctctatatccgtatccccgacaaccgtcacgtcggcctccaggcttcccgtctcataatcggcctcaagtccagcacgcacatacaagtcctgtacatggctcttcggaagcgcatacaggtatacgtcacggaagatcccggaaaagcggaagaaatcctggtcttccagccagctggcgctgctccttttatatacctcaacggcaagtctgttctctccggccttaaggtattctgtgatctcaaaatccgccggtgtaaagctgtcttcactgtagcccgcgaatttcccgttcacccatacgtagaacgctgtctcaacaccctggaaggagaggcagaccggcttttccctcagtctttcgtccagctcaaagcaccgcacatagctcccgaccggattataacgctcagacacctcgggcgggcgcagttcttcctccccgtcccacggatacatcgtattgatatactggttccggtcatacccctgcgtctgaatatgccccggcacctggataagatcaaaaccgcttacatcaaagtcctccccgtaaaactctgcctgccgcatggacggattcggagcacaggcaaagcgccatgtcccgttcaggctctgccgcagcggcattcttccccggcattcggcctcttctgcgctttcataatatagatggtcggaatgggccggcgcccgccccaccgcaaacacctccggatcggcaagccagctgcagtctgctattcgttcattcatttttctgtccctccaaaactgtccgtatgccataaatgttactatacttgtcccctcatggcaagatgatcttcacatcaaaagaagcagcatatgctctgctgcttctttcaaaacgctttatattttactcatccacgctgtagttcggcgcctcttttgtgatatggatgtcgtgaggatggctctcttttaatgatgccgccgagatcttgacaaactgtgcttttgtcttcaattcctcaacagtggccgttccgcagtagcccattccggagcggagacctcccataagctggaatacggtatcttccaccgtccccttgtatgcgacacgtccttcgaccccttccgggacaagcttcttggcatctgtctggaagtagcggtccttgctgccgttttccatagcggcgatcgatcccataccgcggtacactttatattttcttccctggaacagttcaaatgtccccgggctttcatcgcatccggcaaatatgcttcccatcatgcatacattggctcccgcggcgatcgccttcgtcatgtctcccgaatacttgataccgccgtccgcaataataggaataccatacttgtccgcaacttcataactattcataactgccgtgatctgcggcacaccgatacctgccacaatacgggtcgtacagatggaaccagggccgataccgactttgacggcatctactccggccttgataagcgcttccgctccctcgccggtagccacgttgcctgcgatcacctggagctgcgggaatttggtcttcaccatatccacggtcttgagcacatttgctgaatgtccgtgcgcagagtccatgacgatcacgtctaccttggcgttgacaagctcctgtacacggtcgatgcagttcgccgtaataccgaccgccgcgccgcagagcagacgtccctgctcatctttcgcagacagaggatacttgatctgcttttctatatctttgatcgtaataagtcctttcaggttaaaatctttgtctacaataggaagcttctcttttctcgctttcgccagaatcttcttcgcctcattaagagtaatgccctcaggcgcggtgatgaggccttcggatgtcatggattccttgatcttctttgaaaagtcttcctcaaatttcagatcacggttcgtaataataccgactaattttttcccctctgttatcggcacgccggaaatgcggaacttggacatcaggtcgttggcgtccgccagtgtgtgctccggtgacagatagaacggatctgtgatcactccgttctcagaccgcttaaccttgtccacttcctccgcttgctgttcgataggcatattcttgtgtacgataccgatgcccccctgtctcgccatagcgatcgccatacggtgctccgttaccgtatccatgccggcgctcatcatcggtatgttcagcttgatattcttcgtcaggtatgttgacaaatcaacttggtttggaatcacttctgaatatcctggtacgagcagaacgtcatcaaatgtaataccttctccaataatttttcccatgaaattttatcctctctttcttccatctgttgttatgatttaactgctataataaccaattatacccttacttgtcaaccgctttttcatttctttttgccgtatcatgctactggacaacttttctcggagcgagcatcttaaacccttctatgatcgtatcattcggttcaaatataactttcttcttctgtcccctgtcgatgaccaccagcgcatagagccttgccccctcgtttctggaactgaagtcaaaggtctttgcatccgcgtgctgacgcagttccagttcctttacaggcgccagaagctccagatcattgacgtgtgcggagaacactctctttctcttcgccttattcatgatcttatcgatatccagatccccgttcacgaacagatattcatattccacattcatccgcctgaacatgaagacgtccagcacgaccattcccaccggcagaatgatcccgaaaggaaacataaagacaataagcaccgatactatcgtgagcgccgcgagcagcgccttaaaaaatacatctttcatatccgttcttttcttcaccagttgttccgtataataatcgctcatctgcaaatcctccaaattaataggtgtaattattgtaacacatattatggcaaaaagaaaactccccgtaagaggagttttcaaaactttcatactttagcggtatgcgcggattacatcattcccattccgcctgcgccgcctgccggcatagccggtacgtcttctttgatatttgccactaccgactctgtggtgagcagtgtggatgcaacgcttgtcgcgttctgaagcgcgcttcttgtaacctttgccggatccaggattccgttctctaccatgtctacatattcttctgccagcacatcaaaccctgttcctgtcttggattcatttactttattgataattacggagccttccagtcctgcgttggccgcgatgtggaaaagcggagcttccagtgctttcaatacgacatttgcgcctgtcttctcgtctccggtaagcttctgtgccagcgcctcaacttctttcgccgcatgaatgtatgcagaaccgccgcctgcgatgataccttcctccacagccgctcttgttgccgcgagagcatcttccatgcgcagttttgcttccttcatctctgtctctgtagctgctcctacacggatgaccgcaacgccgcctgccagttttgcaagtctttcctgtaatttttctctgtcaaaatcagatgttgtctcttcgatctgttttttgatctgagatactctgtccgcgattttgtctttctcgcccatgccgtcaacgataactgtattttctttctgaacttttacagatttcgcgcgtccaagctggtctaacgtcgtctccttcaggtcaaggccgagttcttctgagatcacctgtccgcctgtgaggatcgcgatatcctgaagcatttcttttcttctgtctccgtatcccggtgcttttacagccgcaacattgaatgttccgcgcagtttgtttacgatcagggttgtgagcgcctcgccttcgatatcctctgcgatgatcagaagtcttgcgccggactgtacgacctgctcaagcagcggaaggatctcctgaatgttggaaatcttcttgtctgtaatgagaatatacggatcttccagatttgcttccatcttatccatatcagttgccatataagcggagatatatccgcggtcaaactgcataccttctacaaggtcgagttctgtcttcatcgtcttggattcttcgatcgtgatgacgccgtcattggagactttctccattgcgtctgcaaccatctcgccgacctcctggtctccagcggagatagcggcaacctttgcgatctgctctttgtccttgatcttgctggacatgcccgcgatagcttccacagcagtgtctgttgctttcttcatgcccttgcgcagaatgatcggattggcgcctgcggccaggttcttgatcccttcatgtaccatcgcctgagcaagtacggtagctgtcgttgttccgtcaccagccacatcgtttgtcttggatgcaacttctttgataagctgtgcccccatgttttcaaatgcatcttccagctcgatctctttcgcgatcgtcacaccgtcgtttgtgatgagcggcgcgccgaatgatttgtcaagaactacgttgcgtccttttggtccaagtgtgactctgacagtgtctgccagctggtttactcctgattctaatgctgctcttgcttcagcgccgtatttgatttcctttgccataatgatctgcctcctaaattatattaatgttcaacatgcttcaagcttctacttaagtattgccaggatatcatcctgctttacgataatatactcttcttcgtcaacttcaacggatgttccggcatatttggaataaataacctgctgcccttcttctacgttcatctggacttctttgccgtccactaccccaccaggccctactgctactacttcagcctgctgcggcttttcttttgactgacccggtaatacgatacctgactttgtagtctcttctgcaactaattgtttcaatacaactctgtctcccaatggtactaatttcatatttattcctccttgttattatctatttgtcagcactcacgaaaagagagtgctaaaagactctagatataaaatagcactctctttttattttgtcaacacactttatatttagtttagaacttttttataaaatccattcctgagccggaataccatcacccgtccgagcttgttccagtaccgctccgtcatacttccgctgcactcgatcaggccttcctcccccgctatcgtgcatttgtatatgccgtccagggaaaataccggaagctccgtctgctttgataataaatatatccgttcttcctctggtttatacgtgattatttcgcactgataaacagtctcatcaaaaaagccctcatcgagtatcatccgctccatctgtatgtccacaggccttccctcgtacataataacttgctcccttcaaaataagggtatcagtttcccgatacccttttatttctatcctatttcatccgctcagccttgatccgctcaagttctgtgaatacatagtcgttcactactttgatgtaagtgcccttcatgcccgaagaccgggattctatgacgcctgcgctttcaaacttgcgcagcgcgttgacgataacagaccgtgtgatcccgactctgtccgcgatcttgctcgccacaagaatgccctccgtgccgtccagctcttcaaaaatatgaatgatagcctccagctccgaataagagagcgtgcttatggcagactgcacgatatgctccttgcgcgtctcttccgcactctcttcattgacggacctgagcatctcaagccctacgaccgtagtcccatattcactcagaataatatcgtcgatctcatacatctcatcatttttgtaaataaacaaggtgccaagtctctcacccgcaatatcgataggcgtgatgatcgcctgataacctctcaccgcatcttcggaaaacccgagcgtctgaaggttcacgttctcttttgtagaaagtatgctcagcaggcgttcgttgagcatctcatcgatatgcttcccgacttcctgttcgatcagttctttgatgacaggcactccgtccgctctgctcccgccgagtatctttccttttttactcaccaccagcacgttagattctaatatctctgtgagcacctcacatatatcattaaatacaactttgctggaattattattatgaagtaatttattgatttttctggttttatctaacaattgtacactcattcacattcctccatcctttgaatgctatattatcatacaattcattttttttcaatcaattccctaattattttttattattttccttattttctacataaccgcatttttcactgccacagagcagtttatttcctttttctaccatataacttccgcagcgcggacacttctttgtggacggtttctgccatgacatgaactcgcagtccggattgtcttcgcagccgtaatattttcttccttttttcgtcttgcggatgactacatccttaccgcacaccggacagggaacgcctattttttcaaggtaaggctttgtatttctgcagtccgggaagcccgggcaggcgagaaaacgtccgtgaggtccatattttatgaccatattccggccgcacaggtcgcagatgacatccgtcacttcatcctcgatcttgactttctcaagttcttcctccgcaagcttcaccgcagcttccagatccggataaaaattctctattatcgtcttccacttaactttgccctctgccactccgtccagcaggctctccatgttggccgtaaaattgacgtccacgatactcgggaatgactgcttcatcatattgtttaccacttcgcccagctccgtgatatacaggttcttattttcttttgccacatagcgccttgctatgatcgtggagatggtcggcgcatacgtactcggacggccgatcccaagctcctccagcgtcttaacgagaccggcttctgtgtaatgtgccggcggctgtgtaaaatgctgctttgtatcaaagctttctctcgtgagctttgagttcatatccagtcctttgagcagtacatttcctgtctctttctcttcatccgcctctgtgtagactgatcggaatccttcaaacaccacctttgatgcggccaccgtaaagcggtaatctccggcggctatcttcactgaggtcgtctcatacttcgccggctgcattctgctggctacaaaccgtttccacacaagctggtagaggcggaactggtctcttgtgagagattctttcatagccgcaggcgtcctcgtcacatcggaaggacggatcgcctcatgggcgtcctggatcttcttgtcgtcctttccctttgtatcattcgccgctacatattctgttccgtaatgttctccgatatacgctcttgcactggcatcggcttcctccgatattctcgtggaatcagtacgcagatatgtgatgagtccgaccgtaccgttgcccttgatatcaattccctcatagagctgctgcgcgatcctcattgtcttctgggtcgcaaaattcagcgctttggatgcctcctgctggagtgtactcgttgtaaacggcaccggcgctttcttcacacgcccgctctttttgatgtcctccacagaatagtctgcatcttccacctcggaaagaattttgtccagttcttctttggagccgatcgtcatcttcttgctcttcgtcccgtaaaacttggcggtcagaagcttcttttccccgtccaccttcaggttcgcatcaagcgaccagtattcctccgggataaaggcgttgatctcctcttctctgtcggcaatgatacgaagcgccaccgactgcacgcgcccggcacttaaccctcgttttacttttgcccacagaagtggacttatcttataccctacgacacggtccagcacgcgccgggcctgctgcgcgtccaccagatccatgtcgatctccctggcgtttttgagggaagctttcactgcacttttcgtaatctcattaaaacttatccggtatacttttttattctccagcttcagcgcctgcttaagatgccaggagatggcctctccttcgcggtcagggtcggttgccagataaatcttatctgcctttttaacctccttgcgcaaattggcaagaatctctccttttccccggatagtgatgtatttgggttcatagtcgttctcagggtccacgccgagctgactcttcggcagatcccgcacatgaccgttggatgcggtcaccgcgtaattgctccccaaaaattttttaattgtcttcaccttggcaggtgactccacgattacaagattacgtgccatataattgcttcctccattaataactagccgtcagttttattttcatccgttaattctcacataataatttttagatatttctctgatatatccctgcagctccaatgtcaccagacgttccagaagctccccggcaggaagcccggtctccttcacaagctggctcacactcttcggacataaaccgagacaactatacaccatattttcgggactttcaagcattttttcatttttgtcagatttttgacccggactgcagacgtgtattcccatatccgcaagcagttcatccggggtagacagaatgcccgcgccctgtctgatcagatggttgcatccgcggctcaacgggcttgtcaccggtcccgggagcgcatagatatccttcccctgctccagcgcgaagtctgccgttatgagggagccgctcctctcccgcgcctccatgacgagcacggtgtccgccagagcgctgatgatcctgttccgcgccggaaaataagcgcgaagcggcggagttcctgggggatattccgccaggatgcctccctgcttctggatatccatatacagcccgatatgttcccgcggatagcacacgtccacgccgcatccaagtaccgcgtacgtcatgccgcccgcgttcagcgccgctctctgtcccgcgccgtccaccccaagagccatgccgctgatgagctccacgcccgcctctgccagccttgcggcaaacgctcccgtctgtgcttccccgtaagcgctgcaccttctcgcgcctacaactgctgccgccggtctccggcagtccggaagccggccttttacaaagagggcatagggcggatccgctgtgaccctgagccgttccgggtattcttcctggaagtacggcacaatttgaatgtttttttcacataatttttcataattctttctcacatcccacgacctgcgggagcttatgacagcttccgcctcgccggcatcgagatattctgtaaaatgaagcctcgtttcttctatataatatatctgacttgcatccgtatattcggaacggagcataatttttttccgggcaggcacgtgtctgatacatgcaagccagtattcatacgccagctccatatgctcacctcccccagtatttcttattcatcatccggtaaccgatcgcttccttaaggtgcgcggtgccgatctgccccgctccctcaaggtccgcgatcgttctggccacacggatcgtcttatggcaggttctggctgtgagaccgagcgtttcaaacgcctgctccatgaccctctccccttcgctgtccaggcggcagtgacgcttcagctcttttacgggcaatgcagcgttcactgtcgtttccagtcctttgtatctctctttctgccgttccctcgctttacttacacgttcccgtatcgcctccgagcactctccgtccttttcttcgttcaggctttcatattctaccctgggaacctccacacagatgtccattctgtccagaaacggctggctgatcttcgcgagatactgctgtatctgtcccggcgtgcagctgcaccgctcaaggtccggataattgccgcacggacacgggttcagggcggctgccagtataaagtcggcgggaaatacatagcttccgtgctttcttgtgatccgtatctttttttcttccagcggctgtcggagcacttccagcaccggcttctggaattccgtcagctcgtccagaaacagcacgcctccgtgagccaggctgatctcccccggggacggtatgataccgcccccgattagggcgcttctcgtaactgtgtgatgtacgctccgaaagggacgcctagctgcaagaggatgttccttgtccaaaagccccataatgctgtatacttttgtgatctccaggctctcatccaatgtgaccggcggaagtatcgtcggtagtcttctggcgatcatggactttccgcttccgggaggtccgacgagcaatatgttgtgaccgcctgccacggcgacttccaccgcccgcttcaccgcctcctgaccgcgtatatcgctgtagtcaagggtctgggcactcacggcgggaagcggccccctcgatatgtggtgtctctcaggctcaatgctttgggtaccgcacagatagtcacatacttcccgcagccatgctgcgcctatgatctttatgccttccacgagcgcgccttccgccgcgttggctttcggaaggatacacgtatggcagccggccttttttgcctccatcacaatgggaagaatcccggccacctcccgcagccgtccgtccaggctgagctcgccgatgatgagcgtatgtgcgaggccattctccggcacaaggccaagagacgcgagtatggccgcggcgatgggcaggtcaaacgccgctcctttctttttcaccgatgcgggcgacagattgatcaccgtcttctttggcgggagttcgatccctgaattgcgcacggcggtgcgcacccgctctgccgcttcctttacttccgatgagagataacctaccatgtggaacatgggaaggccgttgcttatgtctgcttccacatggacaaattccaccgtaagcccttcgatggccgcagacagtaccgtactgaaactcattcgcattcctcttttctttttgtaaatgttttgctgggttggcggccgatgctggccggatctgacttttcggggcagaacgccccgtaaaatgtagatttatcataacgaatatgacagatgatgtcaatagaacggtaaaaagtgcaatagaaaagccgcgcgggcattaaaaatactcgcgcagcttttctattgcacttttctcgatccttgacacataagaacgagagatgcctaagcgtctggctatctcccgctgtgtatactcttcttcattatacaggccatatctcatcttcagtacaagacgctccctctgtgagagctctccttccaccttctcataaagaagccggatatcatccttcagtgcaacttttctgtgggcatcgtcctcgtccgtctcgatgatatcgaacagctggatctcatttccttcccggtctgttccgatcggttcatagagggacacttctttggatgacttctttttagaacggaggtacatcaatatctcattttcgatacatcgggccgcataagttccgaggcggacacatttatcggggttgaaggtcaccacggcctttataagtccgatcgtgccgatagagagcaggtcttcgttgtcttcttccagcgactggtacttcttaacgatatgggcaacgaggcgcaggttccgttctatgagaacatgttttgcttcaaggtctccctccgtatatttttgcatgtaatatctttcttccgaggcagtgaggggttggggaaaagatttcaaggaaagcacctcttggcgtatttgatatagtctatgtggcggcaaatgcttttgtgcttttccatataaaattttcctatacaaagtgaagggaagacgctatattagaaagaagagaggtatgtcatgaaaaaaacttttggaaatattatatttttcagcctggtcataacgttggccgcgcagctcaatatcaacctgtttatcacagacttcaagctgtctgtcgccgtcatatgtttcccggcttttttatttatcgctcagtcttttccggtcctgccggtgactgtgctcggggcggccggggtgtttgcctcccgtctgctgctcgtctggtttcagagcggccgtctggccggggccgtccgctcctattttcctgaggtgatcttctatctctgctacggactggtcttttacctttatacccgccggtctggcggacgccttccggacagaaacaaagcgctccttccgctgtttctcatcgactacggcgccaatcttatggagctgctgttccgcatccgcctcggcgcttttacgccgaaggcacaggcgagcatactccttgcagcggcggtccgcacagccgttgtatggtgtgtcctgactgtatttgcacattacaagctccttcttctgaagcaggagcatgaagagcgttataaacgcctcgtcctgctcatctcgaagctgaacggcgaggttgtctggatgaaaaagaataccgccctcatcgaggatacgatgagcacttcctaccatctctatgaaaaactaaagagcgcggacgagaacggcgcactctcaaaagccgccctgaaggtggcaaaagacatccacgaagtaaagaaagaatatctgctcatcatgcgcggcatatctgaggcgctcaacgaagaactggaaggcggcggcatgtatgtggatgaacttctgaaccttctgaaagacacattaacgctgtcagcagaggagcagaaaaaaacacttataatagagaccgactgccgcgaccgcatctacacaaaccagcattacgcccttatgtccatcttccgcaacctgctgacgaacgcgctggaggctgctataaaagatgaagtacatatatatgtcggagaaaaaagtgaaaaggacacttttatattcacagtcacggacgacggacccggtatccccgaagaggatcagacagaaatatttaagaccggattttccacaaaaataaacttctcaaccggagaggtgaaccggggccttgggctcagccttgtccgggacctggcagaggaccagttcggcgggacgctgactctttcctctgttcccggcaatacaacatttacccttagaattccagcagaaaaaatgaaggtggttatataaatgaaattttatctcatcgacgatgaccgtaacatattaaatatattaaagctgatcatcacgaaccggaagctcggaaccgtgtgcggcacatccttaagcggttcggatgccctggaggacgtacagacgctcgccccggatattatcatcgtagacttgcttatgaccgacatggacggcatctcctttgtccgcaaagcaggcagtctgctgccgcggaccgcctttatcatgctgtcacaggtgtcctccaaagatatgatcgcctccgcctatgaggcaggagtcgaatattatatacagaaaccggtgaacagcgtggaggtggaaaatgtcatctcgaaggtgggccgtcagctttccatgcagcggacgatccggaaaatgcagcatatctttatggacgagatgccggccgcctccccggaaccggaacgcgaagcccctgccgccatcgcctcgagaaccgtgctgacaaatatactccagaggcttggcataagcggggataccggcagcagggatatcatcacagcggtggaatacctgctggaacacgacggacagatcaatgacatgacgctcagcgaactgtgcggcaggttcagcgactccccaaagtccatggaacagcgaatccgccggaccgccaacacagggatggtgaaccttgcgcatctcggcatcgaggattatggaaatgagatcttcacagagtattccaacacactttataactttgagcaggtgcgcagagagatggattatatccgcggaaaaagcgaccggcacggcaacgtcaagatcaaaaactttctgaatgcgcttgtcgtttacagccagaaccggcagtaaatttctataggcagaattaacagtatcattatagtctttttgtgaattatcacaaaattcgtggtggtactgttttttttatgtcaattttgataccttctgtaactttttgaaacccggcctgtatattgagtccatcaataaaagaacggaattatcaataaaatcattcttaaggattgagaggtaaaaagtatgtttacaatcgtatcgggaatcggattattacttgtcacgctggccggattttcactcttcagcctgaaaatgccaaaaggacagcttgccatgtccggcatggccaacgcggccatcgccacatttctcatagaagccgtacacaaatatatcaccggagatctgctcggcatagcgtttttccaccgtctcggagagactgccggaggtctgggcggagtcgcagccgccgccatggtgccgatctgcatgggagccaatccggtgctggcgatcgtcgccggcgtggccgtcggcggatacggaattcttcccggctttatcgccggttacatcgtcgggcttctcgcccctgtcatagaagaaaaactgcccgaagggctgaatatcatcggcggagcgctgctcatcgcgcctctggcccgcatcatcgtcatcgcagtcaaccctgccgtcaatgcaacgcttgcggccatcggcggcaccatatccgccgccacagagcagtcccctgttgtcatgggctttctgctcggcggcatcataaagatgatctgcacctcaccgcttagctccatggcgctgaccgccatgctcggccttgacgggctggcgatgggcattgcagccatcgcatgcgtgggaggttccttcacaaacggactcatcttctcccgtctgaagctcggagacaggagcaatgtcatggccgttatgctcgagccgctcacacaggcagatatcattacatccaacccgcttcctatctactgctctaatttcttcggcggaggtttcgccgggatctcagcagcagtgttccatattgtgaataatgcaccagggacagcatccccgattccgggacttttagcgccgttcgcattcaaccctgcgtcacatgtcatcggcgccctcctcttcgccatattaggcggatgtgtggcaggcatcgccggcagcagggtatttcgtcagaaaataaaagtccccgctgttcctgcaaatgacgaaaggggtcagacccctgtcgccacaggggtctgacccctttcaaaattcggataatattctgacaattaagaagaccgctgtgatgcggtcttctttcattatacctatttagttctctacagcatttctataaatgccgcgatcctcgtattgagctgcccggtgtcggcctgggaataatctgtctccacactgatataaggaatgttcttcttttcgttcacgaatcttcttatgccgagcgtctctacgttgtatgtatgacaggcctgcagcaccatctccaccacaccgtcgactttatattcatcaatgagccttccaagcagctccaggcggttcgggttgggcgtcatgacggagcagccgatattcagatatcttctggccagtgcgtcgtatatatccgggttgtcctcgtccacaagcttatcgatagatttcgcgccggtacagttctcgtatgtcacgacgatccctccgttgtcttctatcgccctgatcactttttcggacgccccgcctatcggacatcctgtcacaaggatgcgtggttttttctcttccatcctgccctgggcatattctctgttgatcttatcaaccagcgcgtctacctcgcccggaattgccgcgcggtcaaatttgaacgtactgccgtagaggactttgaacaagtcctggccttttataggcgccgggtcatttcgcatgacttcatagagctttttcagtgagcgtcgccccgcattgttcactttcaccgcttctcggatcatctcttcggtgatctccacgtcaaatttctgctccagatattccctgaaccggatgatctcgcttttccaaagcttcagcgcctcttccccctgtgtgttcggcagttccatgagaaatacatccttgaactctttcatgtattcatacatctttttcttgccgtcgcacgtcgtctccccgacaactacgtcggaaaagtaaaagaacgggcatttgtcagtcttcgcaaatccatagctggacttgatgagcggacataagtttttcggcagatctttttctgcctccggtatcgtctcatctgatgtggagcacagtcccacagtcgccgctcccatggccatggcgatctcctgcggaaaatacgtacagtaagcgcccacgattggcactcctttatccttcagctccttcacgccaagaaaagaatttttgcgctgttcggcaaattcctcaaatacttccggcagttctttaatcacttccattttgttcctcctgtgtgttctctgatttttcaccagcatataaatgcattctacaatcatcctatcactgcccgcccgatgccgccaataaaaaagacaaataaaacggccgtcttataggcgtttcctataagacggccccatatcgcttactcttgtacgtcaggctctgctcttcgcaaaatgtcatagagctctgccctgcatcccaagtctacatacagcacctgcttcgggtggggagcgctgtcctgctcatttccctcttcatctgccagtcttctgacgacagcttccacattatccccattcggtttcatgatctcgaccgtctctcccacagaaaatttattccgctgttcgatccggtacattccgtcctgctcaccgcttatgatgccgagatacgtatattccttcacatacgtattgctgtcatatatctggctttcatcggccggcttgccgaaatagaacccggtcgtgaactgccggtaagtgcagttggatatctggtcgagataccacggcatatttttcctgtacagttcgggactcctggcataatcgtcgagcgccctgcggtacgtccgcgccaccgtcgccacatacagcgcggttttcatccggccctcgatcttgagactgtcgataccggcgtcgatcagttccgggatatgtccgatcatacacagatccttggaattgaaaatgtaagtgcccctctcattttcatagacgggcatatactctcccggccgtgtctcctcaacgatagaatacttccatctgcacgggtgcgtgcaggctcccctgttggcgtcccgccctgtaaaataattgctcagaagacagcgtccggagtaagagatgcacattgccccgtgcacgaagctctcgatctccatcccgtccgggatcttctcccttatctcctttatctccgcaagagaaagctctctggccgacacgacacgctttgccccctgcttccaccagaagagataggtgccgtaattcgtgttgttcgcctgcgtgctgatatgccgctcgatctcaggacatatctcccccgcgatctcgaacaccgccgggtctgcgataattagcgcatccgggccgatctctttcaattccttaaaatattcccgcacaccgggcaggtcgtcgttatgggcaagtatgttcgccgtcacatacactttgacgccgcgctcatgcgcaaaccggatcccttctctcatgtcgtccatggaaaaattctttgccttggctctgagcccaaaagcctctcctccgatatacaccgcgtccgccccaaatattaccgctgtctttaacacttccaggctgcttgccgggatcaacaattcaggatgtctggccatcttttctctctcctcgttttatgctgagcgccacaccgtccccgagcgggagaatcgatgtgagcagatcttctctgtgttttaattcatacaaatattctctcatacggctgtggatcgtacggttgcgccgctctaccgcaaaccgtgactcaatgatatcaccgtcctgaagcacattatcggacatgaggacgcctccgtccgcaagcagccggagaacctcgggcatgtaatggatatactgtccctttgcggcgtccataaagataaaatcatacggaccgggaagccccctcatcacttccagggcatccccttctatgagcgtgatccggctgtccctgcctgcgcggctgaaattatgccgcgcgatcggaatcctcttcttataattttcgatcgtcgtgatatgacagtcctccggcgtatattcactcatgagcagcgccgaaaacccgaccgccgtccctacctcaagaatactggacggcctgtgcatggcaaggaccgtcttcagaaagctctgcgtctccttccggatcaccggcacaaacgtgtcggccgcctcctgttcgatctcctccaatagcggtgtctccggagtctccagactgcgtatataagtaaccattcgttcgtcaactatcatttcatcatacctcctgctccttacggggacaccataaagttcaatttgggacgtagtctttttaaaaagatcacgtcccaaagtacatgctatacgtccattatgatcggaagaatcattggtcttctctttgtcttcttccagatatattcattcattgtgtcccggatcacgagctttatcttactccagtctgcgttcttctgatgggtcaggcagtcctccacagcgtttgacactacgtttctcgcctcatccatgagcttttcggactcgcgtacgtacacgaagccgcgtgatacgatgtccggtccggccagcagctgattgctgcctttttccagcgacagcactacgatgaggataccgtcctccgccagatgctgtctgtcgcgcagaacgatgtttcctacatctcctacaccgagaccgtccacgagaatttctcccgtgtggactttatccgccacttttgcctctttgctgttcaattccagcacctcgccggactgcaggataaagatattctccttcggtatgccgagtgtctgggcgatccctgcgttcgctttcagatgacggtattcgccgtgcaccggaatcgcgtatttcggtttaacgagtgaatatataagctttaactcttcctggcaggcatgtcccgatacgtgggcatcctggaagatgacgttggcgcctttcgccgacagttcattgataaccttggagacggacttttcatttcccggtatcgggtttgaactgaatatgaccgtatcgcccggcatgatcgttaccttcttgtgaacgtccgccgccatcctggacagcgccgccatggactctccctggcttcctgtcgtgatgaggaccgtcttttccggaggataattcctcagctggtcgatctctatgagcgcattgtcaggcacattgagatagccaagttcccgggcaacggcaatgatatttaccatgctgcgcccttccaccacaacttttcggtcatacttgcacgcagagttgatgatctgctgcacacggtccacattggacgcaaatgtggcaataatgatcctcgtattctgatgttccgcaaatatatggtcaaacgtatgccctaccgtgcgctcggactgggtaaagcccggacgctctgcgttcgtgctgtccgacatgagcgccagcacaccttttttgccgatttccgcaaaccgctgcaggtcgatggcatcgccgaacaccggcgtgtaatccaccttgaagtcacccgtgtgcacaacgatgccggccggtgaatatatggccagtgccgccgcgtcctggatactgtggtttgtctttataaactctatcctgaactgtccgagattaatggactgtccgtgctttactacttttcttctcgtgctcctgagcagattgtgctccgtaaacttcttctctatgatgcccatcgtgagctttgtcgcatatatcggcagattcatctctttcaatacgtaggacagcgccccgatatggtcctcgtgaccatgcgtaatcacaaatccttttactttttgaatattgtctttcagataggtgacatccgggatgacgagatcgattccgagcatgtcatcctccgggaatgccagaccgcagtccacgacaataatactgtcttcatactcaaaggcagtaatgttcattccaattttctccagtcctccgagtggaatgatacgcagttttccattgttttcttttttcaaatttacacctccacgtgcttttccgtactattttgcctctccaggcattctttgcattgtccgtagaactttaattcgtggtctaacacgtggaaccccgttgcctcctcgatatgactctccagttcttccaggaggtcgtccttaaaaggcagtacctttccacaagtcttgcatatcaggtgatgatggtgatgtttggcttccccgaggaaaagctcgccgatctcataacgcgcacatccatcatccagattgatacgatccactaattgcatttccagcaacaactgcactgtccggtaaatagtcgccagtcctatatcaggatagtcttcttttaccagttcgtaaatgtcttccgcagtcatgtgtttatcccgatgatctgcgagcacttctaatacaagcaacctttgattggttaccttaagacccttttctttcagtaattctttaaatttttcttgactgatcgacatagtatgctacctttcaataacaacatcttccagcagttcttcaaacacttttgatacagcgccaatctctacatcatcttctacgatctcatagatgctgtctgagctttcatccgttgtcgtatcctttaaaatgagacattctgcgtcatcttcttcagaatctgtcacgagaatgtatgataccccattgacttttgtctgttcgagcacgaaaaattctgcttcttcctgcatttcttcagacatgaatttgattttctccataaaaacacctcacacagatcattcctgtcccacatatatggaatccagatatccctgcaatataaaaacagccgcaatcttatcgatatattttttgcggtcctcacgtcttaccttattttcaattaaagtccgttccgcttccactgtagtcagacgctcatcccacatcacgacctcaaggccggtccgtcttttaagcatctcaccaaactccaatgattgttccgcccgatcaccaatatcattattcatatgcttcggaaggccgagcacaatacgctccacctcgtactcgcggataagttcttctatcctggcacaggttttgcgcagcttgttctcctccttgcgaaatatcgtctcgattccctgggcagtcagccccagcggatcactgacagctacaccgaccgtcttttcgccgtaatccagtcccataattctcatagacattatacccagccgttatgctcgatatacgtcttaagcatctcttctaccagctcgtcccgttccatcttcatgatcaggcttctcgcgccgttatggctcgtaatatatgtcgggtctcctgacataatatatccaacgatctgattgaccggattataacctttttcactcaatgctttgtacacaatctcaagaatatcttttgcttgaatctgtggaccgctttctacctgaaaaaattgggtgttgcttaaatccttcatatactcacgtcctccaaaattacttctatttcattctaaaccatagcacccgaaaattcaatgtattatttgcaaaggactctcaatttctacatttatgaccttatttgtgagattttccgacccttttcgtccaattttgacatattccttcgtgtggcctgtctcataaagttctccgccgcgcatgaccgtctcctccatcaacacttccaccgtcgtcccgatgagtttctcctcataggccgcctgcttcctgcggctgagctccagcagcacactgctgcgtgccgtctttacttcgtccggcacctggtcctccatcccggcagccttcgttccttcccgttttgaatacttgaacacatgcgtctcgtagaagtccacccggtcgataaacgctctggactcctcaaactctgcgtctgtctcccccggaaatcctacgatcacatctgttgtcagcgccggatcgcggaagtatctctgaagcagctcacatttttcaaaatattcttccgccgtataacggcggttcatccgcttcagcgtggcattgcagccgctctgcagcgacaggtggaagtgggggcagatcttcggtaatccggcaagcgcctgcgcaaactcttctgtgacgatcctcggttccagagagccaagccggatacgctcgatgccgactgtcccgtggaccgcctcgatcagacggagcaggtcatcgcctgtatccactccataagagctgagatggatccccgtgagcacgacctctttatatccgccttctgccagccttcttacctctgccagcacgctctcccgttttctgcttctgacacggcctcttgcgtacggaatgatacagtaagaacagaactggttgcacccgtcctggactttgatatatgcccgcgtgtgttctgcggtgcggcttacgttcagttcctcatactcatcggtatgatcgatgtccaaaaggccttctcctgtctcccaccttccgtcctcatattcctcaagaatccggatcagatctttcttgcggttatttcctatcacgatatcgatgcagtcgtccgcatcctctccccgggcctgcacgtagcagcctgcggcgacaataacagcagacggattcatctttctcgcccggtggagcatctgtctcgacttccggtccgccatatttgtcaccgtacaagtattgataatatatacatccgctccttcttcaaacggaacgatctcgtatccgtgctgcgcaagaagttcctgcatcgcctctgtctcataggcgttgactttgcatccaagattatgcagcgctactttcttcatactctttctcctacttctgtgctgtcccgggccgtcataagacgcgcatgccgtccgctcgtccggggtatacaaattgttgtaacttttaacgaattttctctgatttctttggcagtttgttccttgacttttaaaccttgtactcttaagatatttatagaacatgaaaagaaagccaaggagggtttagtccaatgaaaacagttcagatctctttaaattccatcgacaaagttaagtcttttgtaaatgaaatcactaaatttgattatgattttgatttagtatccggaaggtatgtcatcgacgcgaagtccatcatgggaatcttcagtctcgatctgtcaaaaccgatcgacctgaacatccacgcggacaatgatgtggatactgttttagatatcctgaaaccatatatcgtagactaaatgataaaacataacatcaatgtgcctgcaccgccggatatgagcgggcaggcttttttcatgcacaaatctatttgatctctatgatctccacggtctcaagcgccttgtctacaagctcgtctatcttttccgacagcttttcttccgagcggcggatcacttccacattcggctttgtcaccggatgcttcgccacaaatatggtgcagcagtcttcaaacggctgaatggatgtctcgaacgtgccgatcttttccgcgatgtccacgatctcctgcttgtcgaatccaatgaccggccggtagaccggaagcgtacatacatcgttggtggccgcaagactctgcatcgtctggctcgccacctgtccgatgctctccccggtgatcaggccgagacagccgtcttttttcgcaaaatgctccgcaatgcgcatcatgtaccgtctcatgattatcgtcagttcgtcgtgggggcactggtcataaatatagagctgtatatccgtaaagttcacaacatgaagcttcaccggtccagagtacctcgatacgagcctggccagatccactaccttctgcttcgcccgctcgctcgtgtacggaggcgcatgaaaataagtggcctcgatcccgactccgcgttttgcgatcatatatccggccaccggactgtcaataccgccggacagaagcagcatcgccttcccgttcgtgcctaccggcatccctcccggccccggtatgatcttggagtacacatagatacaatctctcacttcaatgtggagcatcacatccggctgatgcacatctacgcggatatcagggaacgcctccaaaatgacctccccgatatcacagttgatctccatggacgtcctcggatacgtctttctggcacgtctagcctccaccttgaacgtcatctttttgtcaggatacagctcgtccatgtacgccaccacatcctttttcagttcgtcaaaccccttgtcctccatacgaacgaccgggcagatccccacgatcccgaatacccgcttcagatgttccaccgtctcctcaaaatcatagtccccttcgcagtccacgtagatcctcgcctgagacttatagacctgaaattcaccgtccacgtcacgcagggcaaatctcacctgccgcacaagggcatcctcaaataaataccggttttttcccttaattccaatttctccgtattttaacaaaaatgtatgaaatctcatcctattttctgaatcctctctgaattttgaaaggggtcagacccctgtggccacaggggtctgacccctttcatattttacgttattgtctgacatatttccttaacattggtactacattatatagtgtatccagcgtatagtcaatctcttcttctgtggtgaactcggacatgctgaacctgagtgtggcgtccaggtattcctgttctgcgccgattcctttgagcaccccgctgatccccgggtggttggaggaacatgcggaaccggaggagacgtatatgcctttttcctccagcgcgtgcagcagcacctcgcttcggactccggaaaagccgacgctgatgatgtggggggctgaagtctcgtcgtacaggccatggatagtcgtgttttcgatcttccggacgccttcgatgaagtgcgccttcagataccgcatcgctgccactttctcttccagatttgtgtagatcgtctccgcggcaaggcccaggcctgcgatcccgggcacgttctctgtcccggagcggacattcttctgctgttctccgccgtacatgacaggttttatcttcacctgttccccgatgtagagggcaccggtccctttcggtccgtgtatcttgtgcccgctgatggaacacatatccactttcatacgcttcgggtaaatgcggtacttaccgaagccctgtactgcgtccacatggaaaagtatgttgcggttatacgccttgacgatgctcgccgcctcgtcaataggctgtacggagccgacttcattatttacatacatgaccgacacgagaattgtatcactgcacaaagcggccttcaaagcgtccagtctgatccttccatacttgtctaccggcagaaatgtcacccggaatccttcttcttcctcaagataacgcatcgtattgatgatggccggatgttcgatggacgaggtgatcagatgcttccccgcacgcttatttgccctggcggcgcctatgagagccagattatcgctctctgtcccgccggaggtgaaaaagatctccttttcctgaactttccacagctttgccagtctttctttggcctgctttatatacttttctgcctccacgcctttcgtgtgcatggaggaaggattgccgtaatcttcgcacataactttgcgcacgagatcccccacactttcataggctcttgtagttgcagaattgtccaaatatatttctttcataattccacttcctgcattttattctcaataatagattatgtcgctacccttcaagatggaacataagaactgacaaagttgtaagaccggccgtctccgttctcagaatacgccttccaagcgttatcggcacagcgccggcctccacggccagttccacttcctcccgttcaaatccgccctccggaccgatgaacactccgacagactgtcccgggacgatggatgatatcacccgtttcgtctcctgcattccttccgccagctcataaggtatgagcagtacatccatggccgaggcctgctgcagcgcctcgccaaaaccggccaccggagcgacctttgggatatatccccgcccggcctgtttggacgcgctcccggcgatactctgccaccgctccacctttctggccgccttcttttcatccagcctgacgaccgagcgtctcgtcatcacaggcacgacctcagagacgccaagttccaccgccttctgtacgatcagctccatcttgtcctgcttcggaagtccctgaaacagacagatcctggacgcaagttccgtgtctgacatctcttccctgcatatcttcaggacagcctgcccttcttcataacgatcgacggcgcagagaaacttccggttgtcgccgtcactgaccgtcaactcttcccccggcttcatgcgcaggacatttttcatgtgattgacatcctggccctctatgaaaatataaccgttcccgacttgagacggcgtcacaaaaaaatgctgcatatcaattctcctgctttttctgcgctgtgacggagacccattctccctggtgtgtcacctccagcaccgcaaggcccgatgcctttacagcctccaccaccacagcttccttttcctcaatgatgccgctcgttatatagatcccgcccggcttcaggtgggagcatatgacaggtgtgagcggcacgagcacatcggccagaatatttgccgccacaatgtcatatctgtcatagccggccttatcctgaacttctctgtcatcaatgatatttccgatcatgacttcgtactgctcccggctgatcccgttcgcttccatattctcatgggtcgcgtcgatggcacatggatccaggtccgtccccactgcatacctggctccgaacttaagcgccagcataccgagaatgccgcttccacagccgacatccaggatctctgtgtccggtcccacatattttctgagctgccggatgcagagctgtgtcgtctcatgcatgcctgtcccaaacgccgtgcccgggtcgatatgaatgaccattctgccgctgtctttttcctccacctcttcccaggacggaatgacaagtatatcatctatcgtaaactggtggaaatactgcttccagttgttcacccagtctacatcctctgtctgtgactcttcaatgatacactctcccacgtccagataacttttcatgtcttccagcccgcgccgcacctgtccgaggatcgttcccgcgtcttcctcctcgccgaggtagaaggtcagatacgccgtcccgtcgtcttccggaatgtccgggaggatatcgacaaacatctgctccttgtcctccttcgtgagcgggaccctgtcctcgatctgcaccccctgtatgcccacgtccatcagcatactgcttacaatatcttccgcctctgtcgtcgtctttaaacgaaattgattccacttcatatacattctcctataatagtcccagatgagagagcaggatcttgcatcccataaggatgagtatcaccccgcctgccagctctgccctggatttatatttcgttccgaatacattgcctattttaacacctgcgacggatattgtaaatgtgatcacaccaataaaacttaccgccggtacaatggagacgcgcagaaacgcaaaggtgaccccgacagccagcgcgtcgatgctcgtagccaccgcaaggccgagcatcgtgcgcacgtcgagggattcatcttcctccccgcatgaatcgcagccggtgcgcgcctccctcaccatattggctccgattatcccaagaaggacaaacgcgatccagtgatccaccgacgttatcacatctttgaactgtacgccgagtaaatatccgacaaacggcatgaccgcctgaaacaccccaaaatataacccaacgacgcccgccttcgtccacgtgcactttttcatggcgaggcccttacagacagaaactgcaaacgcgtccatcgacagccccaccgcaataataaataactcgtacaatgccatcccgtatctctccttcttttgccttttgtaagcgaagttttctatattaaaataaagaatgtgccttggcacattctcgcgccgagcgcggtcgcttgcgacatattacatcttcgcgcgagtgcgcctccccccggagggtttttataacatagggaacgaagtttcctatgttataaaaaaagacccatccgtggtgtgtccacggataagtctcattatttaaagtaatgccagatgtatctcatcagcatgttgacaatactacgcccgcgcgccaactactcccttaccgatagttgatattatacttaccgcgcggaaccttgtcaacaaaaaataataactgttaattattctcaaaatctatgtttaaatccacacttccttcgacccctggtactgtgccggactctgaatactgccacatggaaaactcataagggcactggggaacactttcatagtctgcataccatttatcataatccgcgagcctttcaagctccagcgtaaatgccatccatttcatattggcatagatcaggctgtcgtaaccggcctcttctacgctgtcgcagaaagcaatacagttatccgtaaactgttcccttgaaagaccgtctgtcctggactcgtcatccttgatctcctccgtgtcgaacgcgaccggataagtgatctcatattcccggatcctttccagaacgaaccgggcctcctcaagcgcctcttcctctgagaccgcctgtgagaaaaaatagacacccactttcagacccgcgccgagtgcgccgtccatatgcgaccggaacagcttatcttccacaagctttccggagcttccatagccccgatagccgactcttatcatggcaaactctattccggcctcccgcacctgcccccagtctacagactgctggtattcggatacgtctattccggtccgtgataccactgtgccgtccttaccggtataatatttgtaaccttctttttctttcagcctctcatactcataactgcagccgggaagtccttccagataatccgcctcatagacagccccttccacatcgacgaaggtgtatgtccgtttgtcctcgtctttcccggatggatccgaagcggctcttcccccgttcattctcccgtccgctccggagcagacgtacagaagaagcgctgctgccagcacgatggcgccttccaggcaccgtctgcggtatgcggcttttgaaccgtccaacatatgaatcccctaatcttcgatctcgttatccatgggggaaatgaccgagagacagccctccatggatttttcatagaatttatactggttccttccctcctgcttggaagaatataacgcctgatcggcacattggaacagcttttcatatgtagtcccgtcttttggatatatggcaacacccatactgatggatattttaaaattataataataatctgcgagcgaatcaaagatacggttcacaacataggaaaaatcatccctgtattcagcgaaaataagaaactcatctccaccgaccctggcggcgatatcttcgcttcttatattctgcagtatcttctttgccacaaacttcagcaccctgtcgccaaacagatggccgtgctggtcgttggcatttttgaaaaagtccagatcaaacagtatcagcccatatctccggtccgtatcttcttttagcatggaagaaatgatcttctgcgcgttggcatgattatacagcgaggtgagcatatcctgggcagccgcctgcttcagcatgttcatctccagccgctcctcgtggatatctatcatcttgccgatggatccgctgtagatacacttctcctcatcgctccagagtgcgcgggcgatcagtttgcaccaccgttccctgccctggatgcgcagctgatacgtgccgctcactacaggatgagcgggagtggcgctgcgtaagttcttccggatctcgcagagcgcgtcgtggtctatgatctcatcgataatgggattatccatcggatggagggctatctcgtccgtgccgagatagttggctccccactcggacagcatgatcatgtctgtctccgcattatattcaaactggatctcctgcgacatggacgcaaagaactgatacttgatccgttcctgctccagaaggttcagcgtgcggtccgaagcggttatgcctcccgactcgagcagttccgacgtgatgtttctcatctcgttgttcatcgtgccgccgagtgaacgcaccttcaattctttggaaatatggtctccttcttcgataaggcattccagcaggaccggattaaacgcgccgcattccccgtgcagtatcatctccatcgctttctcatgttcatatgcgggcttatatacacgcacactcgtcagcgcgtcatacacatccgccagcgacactacctgagcagctatcgggatatcttcccccttcagtccgtcgggatagcctctcccgtcataacgctcgtgatgccagcggcatatctcatatgccaccttcacaagcccttcattctgatggttcggcacacttttaagcatctcggcgccgatggcagagtgggtcttcatgacctcaaattcttccttcgtaagcttgcctggcttgttcaaaatctcctcagctatggatatcttgccgatatcgtgaagcgcggatgcgtttgtgataagggcgatggctgcgctgttcaggttatattcctccgtccggcgcgcaagcgccttgagcaggatctctgtgatgatccggatgtgcatgacatgaaggccgctctctccgttacggaattcgacgatcgtactcaggatctctaccatgagataattattcttttctttttccagtatctgatctgtcaccataccctgcagcatcttctgctttgcatacagcatgatcgtattgctcacacgccgcctgaccgtctttacgtcaaacggcctgcttatataatctgtcgcgcccaggtcatatgcctggtcgatataagccgatgacgtctctgccgatatcataatgaccggaatatgctcgatccactttcctttattcatcattgcaagcacttcaaaaccgtccattaccggcatcacgatatcgagaagtataattgcaatgtcattttcattcttctgcagatactgtactgcctccagaccattgaccgcctccgcgatctcatactcgtcgccgagcatgtcggacagaagagacctgttcatttccgtatcatctacgattaatatcttgtgtcttttatccatacccctaccttgccacatcataaagaattttagttacagtttcctctatcatatcacattccggctttttttcaaaggttaatcatattctcttccacttcatccagacggcccatgatatcctcatgctgttcgtcggtcaaaagccgtttattatagcggtaatatttgtcgcagccgtattccttcaggtactgaatgctgtagtgatttgtgttgagctccgcgataaacgccaccatctcctgactgtccccgaaagcgtcctccataaaatcaaatgcgctatccagcgcgcttcctgccttctctgccgctttttctctcgcttctgtctctttcctgaattcttccttcacccgctcaaatacctcatcctggggcagatgctctcttttgactgtctgcccgtatgactccagcgctctgagcatacgtctgtatatctcttcttcccgcctgtcaagctgttccgctttccgcagcctctcatactcctcctgcgcggcagcggtgacagccgcaagcgtctcattgtctttcattctgagcagatatccgtgcagaagggtaacataccggtcttccataacgtagccccggaataattcgccaagctttcccgtcagtatcccgaccacactgagacgttcatcaaacggcgcatatctaagctgctccagcacatccctgctgtactggccttcaagcaccttcaaaagtccgtaatccttcttgtacttctcgaacagctccagataattcgcaaagtctttggcgatcttccagtgctgtatatactgatatacgacctctctgtccgcccttttcccgatcacttcgtatgctttgatgagctgggacagatcctcccatcctcttgcggtggcaaacatctttccgtccaccgtcgtctctattctgtagaagtattccttttttaattccagataggcaaggaccgcaggatggatctcagccgtataggcgtattccttccagacttcaaagttctcctccacctctatcttcttgatcctgtccagcgtgacgacgtcaaaatctctgacagacttgttatactcaggaggattccccgccgccacgatcacccagccttccggcaccttctgattgccgaatgtcttgcactggagaaactggagcattgtcggcgccagcgtctccgacacacagtttatctcatcgatgaacaaaattccttcctgcattcccgtctgctctatcttgtcataaactgcagcgatgatctcgctcatcgtgtattcggtcacagaatactttttgcctccatactccttttcctgtataaaggggagtccgatcgcgctctgcctcgtatgatgggtgatcgtataggctacaagcccgatcttacattccctcgcgatctgttccattatctgcgtctttccgatccccggcggccccatgagcagaatcggtctctgccggacggcgggtatcatatacgtgccgaactcgtcctttttcaggtaagcctcaatagaatctttgatctcattttttgcccgttttatattcatctgctgtctccttctatgtcctcccccgccagaacgagctttatcgcccacggcggcacgtctgtgtcttcataatcctcactgaaaaatacgaatgccgtctcaaaaggcggcatctttgacggatacgtccccctgccgtcggtaaaatatatcagtccccgcagacgggtgaatacctgttcctttataagctgctctacataagtgaacgccggccggaaatcagtccctccctcgccgtacagtgtcaggctgtccatataccgcttaagcccttcttcgtccgtgatcttctcatccgtctgtactgtgtcgtcacactgtataatgtggatgttcactttacggaagaaactgtcgttctcactgagcaccgcgtaagtctcttccagaaacttcttcaccagttctcccgaacacgacatggacgtgtcaatgactatcacaaactcttccaccttctgcacttcacgccattcctgcggttcaatgagcggcatattgccgtacagttcaagaccgtacgtataaaatacatagtcaaacgaatccggatcgaccaccatctcctccttgagcacggaaaatttccgcaggaactggcggtagtcggcacgctggcggttctccaccttcacatgatcgatcagatggccggactcggcagacgcctctttggaaaaagtctccatatccgtctccatctgctcgcttatatcctgccacctgttctggatctgctgctgttgctttttgtcattctcctgcggccagcggctgtggctgtcgatcctgaactcttcctccagcctcttaagttctctctcatccagatccctgtaaagcagtacaccatacaccttctctgccgtcaggaccttcatctgtcctttcagcctccggtatgtctctctcctcaaaacagagcgtctcctcagaatacagcggtagttcatcccgtccaaaatatactctgtaacgatatcacatgccaggtcataatacctcgggtcccgcccctttctccccgtcatatgacgaaagacgccgtgcagcaccatgtgaagatacaggcggctgacaagcgtcctgtccacgcggtacagacctccgagccagcggggctcataatatatggtaaacccgtccgttcccgccgtctctataccttcatccataataaaggaaaaactgctaagggccacgtccagaaagcgcatcttcatgtacagttcatttctggccgcagctaaaatctgttttcccaccgcttcaagctgttctgaaatcgtctgcccgtcgttcatattgtctgttctctctttcctgctcatagttcaaatgtttttttctttcctgccggcagcttctgtctttcattcatcagcacgccgaccagttccgtgtgtcccagctctgacgctctcctgacagcctcatcaactgcccgcgcaccaaagcagcctgtccgggacaggaatcttatctcgtcaaacgcctcccgctccgccacatagcggcccaccgcttccatatggccgtgcagatactccttgtatgcagacccggacttctccgacagtctgaatggatacataagccgtccgaggacaagctcgatcaccgtctcctccttctcctcagttaccgcaaacggcagcagttcgtcgtattttttatagtccagttcatggttgaaaaagcactgccggtaatagcctccggaaccgtgatgctctgttacaagcagacgggcgggcgtattttcaaccgcttcctcgtaatgctccggaaagagtattctggctgtctgcaccccgccgtgcgccccatgataataaagtattgcgcgtatggcaaagcggatctcatccacaatagacttaagcgcagacttctctcctctgtaaaaatgtatctccgcttctttgaggcggcatccggtgaaggcgccccctcctatatcgagcagactgtcggtgagggtcagctttctcagatttctgcagcggtaaaatgcataccgcccgatctcaccgactcgtccaggaaggcggatctcttccacctcatccgtgcatatcctgtgcctttcgcccacatatgcggcatccgggctcaggtatacgcagtctgtctcttccccgccgtccgaaaaagcgtacggtccgataccgtacactgcatgtccctcgatctcatcaggaatatacaagtttccgtcaataccgtaacagcctgtgatcgtcactctgtctctgtcttttttatagtgtatctccgggcagatctgctctgccgtctgtctctctgtcatatatgataccccggaaaatgcagacagaacgcggcgcttccgtatgaggatctgatcatcgccaccgcgcgctgtccgtatttgtttaaagctttcctacttcttttataaatatacagttaaacttttccagctcgtcataaacgatcccatgcccgctttcatccaactgataaagtctggaatctgcgatacatttatgctgtattttgacaaggtcgttggatacgaccgtatccttcgtcccatggatgatagcagtcggaacccgcaccgcatccagatcttttctgccgtcttcatctctcagcgaatatgccgtctcaatggtggcgataccggaggcagacagtgcgatcagctcgaaccagtccttcaccgcgccgctttggcagctggcaaaaagctggtcatggctgaaatcgcgcgcaagctgcggccggtccgtctcagcctggcatataagcccgtctacatactctctcgtgagtccgtacggaaatcctgctcttctcgtccagcacggcgcggcagccgcaagcagtatcagcttcttcacgccgtaggaacggtaattcttcatataacgcagcacaatggccccgcccatggaaaatccggtcaggacaaagcggtacagtttgagcgccctgaccactctgtacacatcatccgcaagcgtatcataatcataaccacaggcaggagaatccgaatttccaaagcctctcagatccataagtacgactctgtaattattcttaacgagcagcgggatctgatactcatacatcaaatgggacaaaggccagccatgcactaaaaatacggtctccgtgcattccggattatatacatataccgccagcttgaccccgtcttttgctttcacataaaacatctgcaatcctcaaaactgtcttttaaatcaatatatgtggatcacgcggcatcgtgcacgcaacagtcctttaataataccctctgaacaggtttctgtacatattccaccacgtctttatataaagcatgattccggtgcgccatgtctgtcccgggggatcgtccgccctgcacatgacgtggtccatacggaactttcttgcataatggtccgccttcctcagatgccagccgtttgtaacgacaacacagtcttttaagccattctccgacatgagtgccttggaatacttcatattgtgataggtgctcactgacctcggctccgtatagatcacgtccgccggtacaccgagcttaagagcatgatccctcataacttccgcctccacatgagaattggacacggcgcctccgctcagcagaagagcctttacctttccttcccgcagcagcccggcccctttttctaccctggttctcatgaagggggacggactcccgtcttcttctgcataataaccgcagacgacggcacagtcatatgtatgtttcttccatcttcttttcggccttcggaataccgcagtaaatatgcatatattcaaaaggagaaaaacggccgtcagccttcccaggatccccgccgtcttctttgccttatataagtccataatgctccattgcacggctgatcccgtcttcctccactttatcagtgatatgttctgtgtacggctcaaggaccgcatcgtgtctgcccatggcgaccgcatgctccgcaaattgaaacatggacaggtcgttgctgctgtctccgaacacatatacctgctccttttcaaagccaatgcagtccatgatgcactgaatggctgtcgccttgctgaactgtctctgcacgcactcgtaaatgccctgtcccctgtcgatcgcctccaggtctccttttataaaatccagaaacgtctctttatcgctgtggctgtccgtatacacaagcagcttgtcatatataaaattcttatcctccatcgcacgttcaagcccaaggcccgcaccggcaaaatatctcctcatactctctatctgttcaaaacgcgagatcctgttggaaaagtatacgtcctccgttccctcgcacaggccttctacattacatttttttatgcagtcgatgatctcggtccctctgtcttttggaatatggttttccagcagcaccctgtccttatataagagataagtgccgcagccgcacagatagccgtccatcttaagccgcacgatctcaggcggcagacttccgtatgtccttccggtattaatgaaggtaagatgcccgttctctcttgcagcatggagcgcatccattgtactttgaggtatctctcctgtcacctcgctcagtaaagttccatcaatatcaaaaaacaacgcggcctgtctcatcttagtacctctctctccatcacgttttacgttcacatccttctatatattatcatcctgccgccggaatgtcacggtgcttttttcccgcccggcgcgcgcccgggaaagaaagtgtaattgtccttgcctgccccgtcatatatatttggtagatcaatcaatggcaggtcaattatatgcaggaatttgttattcaagtcatgaatcaatttggttatctcggcatctgttttctgatcatagtcgaaaatatatttccaccaattccctcggaggtcatactcttttttggcggatttatgactacatgcacagaaatgaccataccgggtgtcgtgctgttctccaccctcggctccactttaggcgccatgatactgtacgaagccggctgtctgctcacgccgtcccggctggaagctcttctgaacacaaaagcgctgcggcggctcggctttgaaaaaaaggacgtggagaagacgaccggctggtttgaaaagcacgggcaaaaggcgattctgttcggccgctgtgtcccgatcatccgcagtctcatctctgttccggccggtatggcaggtatcagactgcctctcttcctcttttataccgtggccggaagcactgtctggaacatatttctcgtgtcgctcggcgcctttatgggctcttcctgggatacgatccagtcttacctgcaggcttacgcttccctgacccgcttcctgctcatcacattggccgtcatactatgctggcgctgtgtgcgcaaagtgtcaaggagaaagacaaaggggcagccgcgctaaatatgacggctgcctttattttttaagaatccgatccccgacatcatgatatcctccgtcatcgccgcaatatcctgggcgctgcctgccatcccctccgccagccatttctccagcacgccgatgcaccctgcgcttacaaatgcgtaaaaatactctatctgttccggtgtggctccctcaaagtaacgggtatatgtctccacgcagttctcctgcccgatctggatcagacgggcggcaaactccttgtctccgtacgggccaagcgtcactgtacatatatccgcattatccttcagacactggaacacacctgtcgtaatgttaagcggagtcagctccttttccccggagtccagaagaggttccagcgcctttctgaaatcagccgtcatttcatcttccatcttatcaagcagatcatagatatccgtatagtgggcatagaatgtgcctctgttgatacctgccttcccgcacagctccttcacagtgatactctgaatgggcctgctcttaagcagtgcggtaaacgcttctctgatgagcatttttgtcactcttgtgcggtaatcatttttactcaatctctcaccttctctttctttcatttaacggaatctgtacagtatcatacacaacgcgccctgaatgtacaaaatccggccgcccggcttcaagctgtccattgttaccctgtatataatatattataatacatatatgaaagatatccaacaccgtgtctgtttttttggaggtgtcatctatgaaaaaaatatatatcataacaggggccaacggccatctcggcagggcagtcatacgccttctcctcagcacagacgccgaggtcagaggactgatcctgcccggcgacacgaaacagctctttgaaaacgtttgttacacaaaaggggatgtcagagacagagaaagcctccgtccgttgttcctcaatacagacggcgccgaaacgtatgtcatacacgcagccggtatcgtggacatttcatgggagctttccacgcatgtgtacgatgttaatgtcagaggaacaaagaatgttctctccctctgcgccgagtacaaaataaagcggcttatctatgtaagctctgtacacgccatccccgagaaaaacagcctctgcgtgcttcaggaagtatcccggttttcgccgcgggaagtacgcggaggatatgccaggacaaaggcagaagcgtcgcaggctgttctcaacgcagtaaaaaaagggatggacgcagttatcgtccacccctccggcatgcttggcccggacgcggtctccggcagttacctcatgcagctcgtagaagactatatgagcgggctgcttcctgcctgcgtcaacggaggatatgattttgtagatgtgcgggacgttgccgcaggctgccttctcgcgctggaaaaaggaagagccggggaatgctacatattgtccaaccggcattatgaaatacgggagatcctccatatcatacgggatcttaccggcggacgccgcctcccggttctgcctgcatgggcagccagggcagcgtgtccggtcatacggcagtgggcccgcatgaaaaacaggcggccgctgtacacaaaatattctctctacaccctgaaaagcaacgaccgcttttcccatgacaaggcgacctcctgtctcggctatacgccccgggatatacgttctactcttaaagatactgttctctggatccaggagcagaacgtttctgttcctccaggttcataaaaagtgtaatattgaaaaaccgctcatcgtatgcaacatgcaccataccgcggtatttctccacgacccgtttcaccgaggcgattcctctgccttctccttcatgcttcgtggataagtaccgccctttcctttccacgatcttgttctcgtacgtattcctgagcatgatcacaagctggctgccttttacagctgcttttacttcaatttctctctcacctgtctgccggcctctgcatgcgtgcagtgcattttccaacagattgccgagcacgctgccaagatccgtctccccgatatgtataccttccggaatatctgcctgtatgcgtatctttattccggcgtcatctgcaagcgttctgtaatgtctgagtatgacgtccgccacatgattctcacagagcattgtgtctgtatccgccatatacaccggcgcaagctgcttaagatactcccgcagcccctcgatactgccgctgtccgcaaacccggcgatgacgagcagatgatggcgccagtcgtgccgcagccgcgctgtatcttccatatgctcgatcatgctttcatacttttcctcctgcatctggagctgggaagcgataagcttcgtctcctccatcgcggcgatacccttgtatgcctgaagaagcattacgagtgtgacaaaaaagaaagcgtatgtgataaacgaccagagcacactgaacagcacgtcccccttctctatatgaacaggccgcttccagaaatctcccacgatctttacataaaatactatataagtaagcgccggtatcatccagatgacccgccagaaggaacgtgaaatattcagttcaacgatccgtctgaaaaaacggaccagaaggatccaaagcagaggcacataaaaaagagtcaccccgtatgagacgagcatctgggctgccgcctccggcatctctttcaagtgcagagacacgatcgacttcgtgatcgccataatgttcacatacagattcaaagtgacaagcacgatgaacagaagctcaaagccgctgctctctatcgtgatcctgaacacagccacggccagacagaaccagagcgcaatgcccagaatattgtattcggtgaacagatgaccgggaagcagaaataaaagcgtcgtaacgaccgtgaccactatgagcgccgacacccacagcgccgtccttacattcccgtaccggaaccggctcttcaacggaataaatataaagcaggcaaatacgatacaggtgcctgccactcttaacgccgcaaaaatatcatctgcattcatcatctctgtatctctctcttacaaatattcattctcatattccctgatcggtataggcacgctgaacagatagccctgaacatactcgaccccgcagtctccaagtgccaggagctgctcttcctcttctattccctctgccaccagctttatccccgtctttttacagctttccacaatagtcctcacgatttcctgcgtcttgctgttttcggctatgtctttcaccatgctgcggtccagcttcagcacgtcgaattctgctgttgacagcagcgcaaggtcggcatggtcggtcccgaaatcgtcaagagttacgccaaatccttcgctccgaagtccggcgatcagtctgcgcatttctgtatcggtgacatcacctgccttttctgtgatctccagttctatcagtgtcggcggtatcgcgtatttccggcatatttccttcagccgttctgtaaaagacggctgccgaagtgaatgatgtgaaaaattgacagatatcggggaggcttttttcccttcctttgcccacgcttccatctgagagcagacaaattcaaacacataaaaatcgatctggctcaccgatctggcttcctcgagaaggggcaggaagtttccgggcagaaccatcgtcccgtcatcggagcggtaacggatcaaagcctctgcgcctaccggcgtgcggtcggccgaggatatctttggctgcagatagacttcaaatctcttccggtctatctcctgcttaaggatgcgcggatcggcaagctgtagtatctcatcgctgtgatgacggtaacggttccctttcctgctctttctgtaaaactctttcttatcttcgtacatcatggcatccgcctttgccacgatctgattgatattctggaattcacccgcccactggctgccgatggcggcgttgcaccggctgtcgccctcaaagatccgttttaactccgccgtcctatcttcaaatttctctttcggaatgtctgtacagattatgacaaactcatcaccgccgacacggtaacagtcttccttcctgaatatcactttcatcttatcagccgcccgcacaagcatgcggtcaccctcagcatgtccgcgcctgtcgttgacttctttcaacccattcacgtcaagatatataatgccgacagaacttttactttcctgcagcgcctccagatctttcatgaaccggttgcggttataaaacgaagtgagtgtatcgtgataactcagccgggacagctgctgctcattttctgcccttctgtaagtgagaaggataaaataacagagcgtctgaagcggggccccaatattcagcagcctctctcccggtggattatccactcccagatatcctatgaccactccgtccttctccatcggcgcagccacaaggctgctgatcccctgagcggccagtgtctcatattcctttggtgaactttcccggtactcttccagattttcgatcaccacacattcctgcttttcaaaggccgggcgccagcgttcgatcaaagagaccggaagttcctgaagattgtctatttccggctccactccctgtgcacaccattcaaattcattatacatcttcccgtcttttatactgaatatataggaccgctccgcctgcagaaagctgccgagctgctttaggacctggttcatcgccttaacgatatcacgcccctgataaagcacacgaatacattccatcaccatattttccacatccagggcatatttaagcttctgtctctcgttctccatctgcgtcatatcaaacgcgatctccagacgggcctttttcccatcccattctatcaatctgtctttcagtatgtaatggcggtttgtgagctgattggtcgtctcccagctgtaattttctcccggtttgagcagtgcgttcgtgcagaaagaacacggagcatcctgcccctgcagcgccttgtagcacttgatcccgctgatatcatccagatgaaagttctttttccccgcctcattgacaaacagaaggtcataattttccacatccgccacatagataagctcagatatctcattgatcggaacttgaagttcctttgccattttgtccaaatgctctcttttcagacggttttcatcttccgcctcctggatctccttctgccttttattctggacagatccaaaccatatgaagaaaccggccacaaaaataaagatcacggcaagcaccataaaccctatctccgctatccgggcattcttttccgagtacgtctctgccgccgacaccgtctggtccgccagctcaaagtattcctggctcaggccgtacagccggctcttatccgcgccctgccgcacgcggccgatctcctccttcagcacactaaagctttcctgcatctgtgtcataagctcctgaaattttgtgtcattcagacggatgagtccgtgttccccctctcccgtaagaagttcctctatgatcttgtcgagacgttccataagtttatcgtccggggagccctgaagctcttcttttacaagcttctgcgtgcctcccctgactacgcccgcgtaattaatgacccgggcgttcccctgcagtttctgaatcgatataaaagaaaatattcccaaaagggccagcgccaccgacagtattatagtgatgatctttctttgctgtttgttgtctccagacatgataagcccctttccactcataaaaataaaccgtattttaaaggtttacgtaataactcaatcataactcattttttcagttctgtacatccgtatcggcactttattttctcccataatatggaatacagctatttcagtatataaaaattatccctcagaagcagccagttggctctgaaccactgcatgatctgccagtatccgcatccccggagttcatactccgttatgaggccgaacttttcctgaagactccgcacatcttcaaaccagacctcatgctccgtgccgtcttccacatagttataataggggctttgcgaggtctcgtcgaaccgtatgactgcgcctttctctatggcacgctgcaccgcctggacattcccgatcgtttcggcccgcgtaacgccccgctcgtacggaaggggccagtcatatccgtagttcgggattccgagactgatcttccagtcggggatggctgtgacggcatactctaccacagcccgcacctggggcagcggcgccactgccatcggcggcccgtaagtatatccccactcatatgtcatgagaagcacatgatccgccgcctctccgagcgcacggtaatccttgccttcatacagaagccccctctgttcttccgatgtcttcggagccagggcaacagaaatccagcgcccgtccgcgcgcacagcctccgccgccttttggacaaatccggtaaaagcatccctgtcgtcggccagtatatattcaaaatcaatatcaagccccctgtagcctttttctctcatcacctgcagcaggttcgagataagaagatctgaggcgctctcatcgtgtacgacagcactgataaggcggttattaaaccggccgtccgggccgagcggcgtcagtgtcaggacagcctcggtgccgaaccgggccgcctcgcgtatcatccatctttcatcgagaagcggcggtatgagcgccccctctgccgtaaatccataggaaaatatagaaagttccgacaaaaacggcagtgtctgctggagcacccatctgctcacaaagggataggcataaccattcacatatatatttctgcccggcgtgcgcgctcctgtctggatgagcagcgcctgcccgaccgccagtctgtaaggatatacgagctggttgtcgtaaataagctgccacacctccacaccatacgccgccgcgatgccgtcaatattctctccttctgttactacatgaatctgcatagaactcccaacctgaacgtctgttgttcttagcatatgccggcggtatggaaggcgcaacaaaaaaagccgcggacagcgcagattttatcctgcattgtccgcggcccgctataagcctgccggcatccccgttttacatctcttttatcatcgttccgtccagtccatacacaatattgcttatgacatactcaccgtcgtttacaaacacttcgatgagattcggttccacaaagatatccagcttacatcctcctttcagaggaggtgtgcagcatgtggtacggtaaccctcaagcccccggaatacccggcttctgtccgttctgatacatccgtcttctgcccatatccggtagccgccgatatcgagccctctttcttcctccagtacggccctcacataaaacggctctttaaagtcagcctcatcccccggagagaccacgctcgtaaagtgctgcttcacctgcggatgcacccggaaataaatgtggccgtccgacacttccaccactctggggaggcacatcattccaatccattcaccccgttcgtcctccccggagacaaccggttccggcatcctcatccatgcgatcatgacgcgccgcccctctgcgtccacattcgtctgaggcgcataaaggtccagcccgtaatctatgaactgatatgtttcaggcagcttcaggcggcagtcctcctcgcggaaatcagccagcgcgcatacagcctgatccgcataggcaaggccgtcattcataatacccatgggacatcctgcaaatacccaggctccgtctgtctcaaacagatccgggcactctatcaccgttccatatgcatcgttttggtactgtccggcatattcccatttctgcgcatctttgctcttatagaaaagtacacgtccggtcctgtcattgagcgtgcttccgagaatcatataaaagtgttctttatcccgccacaccttcgggtctcgcgtgtttctcgcatctgctgttctgctgtcgcggctcacggggatgatctgttttttccccgcaaaattgtcaaactgttctccgtcgtctgagatgagcatggcctggctagtcacaaaccgcccgtcttttgccagatgtatattctcttcgtcctccgcctcatatctgactgcggagtaatacagatacagctttccgtccttctcaatgccgcttccggaaaagacaccgtcacggtcgtagtcctttgtcgggaacaccgctgttttccggtgttcccagtgtatcaggtcctcgcttacggcatgtccccagtgcatcgttccccacaccggagcatacggaaactgctgaaagaagacgtggtattttcctttatagtagataaatccattggggtcgttgagccagttccccggtgctttcaaatgtaatacgtctcttaacataatatacctgtcccctttttattttaccgcgcctgcaacgacaccgccgatgatctgcttctgcagtaaaacatacagaatcacgatcggtatcacacagagcagcagcccggccattatcgtcccgtagtctgcggaatatgtcccataaaagctgtaggtcgacaatggcagtgtcagaagcttcttgtctgaaagcacaagcgaaggcagcaggaagtcattccagaaggccagtgaattcaatatgatcatagtggagatgatcggcttcagcagcggaaatacgatcttaaaaaatgtctgtgaccgtgtacagccgtctatgtaggccgcttcttccaaagcgatcggaatgctgccttttataaagccgtggaacatgaacacggacatggccatggaaaatcctgtatgcatgaatatcaaagtcagcctgtgattcagcatgttcaaagcgccgccatagatgctgacgagcgggatcatgatggcctgaaacggtatgatcatggatgccaccatgagggcgaacgtgatctttgacactgcgttgttatgacgcacgatataatacgccagcatagccgcaaacagtgttacaagaagtgttgccgatacggtaacgatcaaggagttcttgaaagcattgaggaaatccatctgtgtaaatgccttctcaaagttgtcaaatgacaggccttttatcgtaaagagccacgaaaacggactcttgatgatatctctcttttctttcaaagaattgatcacaaccatgagaaacggaaacatatatgcgataaatacgatcacgaggatcgccattgccagtatgttggccgttctctttttcgttccgcctattgaacttttattcattatgcctcaacctccttcttctttgtcagatatacctgcagaccgctgatgcaggcaacgatcacaaagaggatcaacgcttccgcctgccctacgccaaactgtctggacgtgaacgccttctcatatacgtgcatggccgccatctctgtcgttccgtacggcgcgccggcagtcagtgaaagattgacatcatataccataaacgcccgggacaatgtcagaaacaggcagatggttatagacgacatcataagcggcatcacgatactcttcatcttcttccagccggttgcgccgtcgatactggccgcctccatcacatcctcgctcagtcccataaaaccggccacatatatgagtatcatataacctgagagctgccacacggacactaccacaagagcaataaacgccttcgtaggatctgacagccacgataccccgaacagttcccagttcgtggactcccctatattgacaaacactctggaaaatacaaactgccagatgtacccaagcacgatacctccgatcaggtttggcgtaaaaaatcccgcccggaagaaattctgccctttgatccctctcgtcagcagatacgccagaagaaatgcgatcacattgacgagcactacaacgagtatgacatatttaaatgtcagcagcagtgacgtccagaactgctcatcctttacaactccctgaaaattcttaaaccctacaaagttcttaatttcagccacaccgttccagtccgtcagcgtcagatatataccgtagacaaacggtatgatgactactgcaaaaaagcagaacatacccggcagtgcaaacatacagaaatcttttccttttcctttcgctctcataatccacccttctttcctattcctggtcttcccagtatttctgaacagcttccgtcagttcatccctgccgcttctgtctgccagatacttctgcatggccgccccgagcactgcccagtggtcattgggcacaatggccgacgcattgaacgtctcctgtgaatggactttttcatatatgtcccggctcagaggatccgacggttcatacggattattccggaacggaggaatcacattacatgtctttacaagcatctgctgcccgatctcactgtacacgatccagttgaggaactctctggccgccgcctgctgtttctgcgtggccagctgtccgtccagcatcacctgctttgacggggatgcctgtatctttccgtttacaaaatcatcactgtcattgttcataaagtatggaaggaaaccataatcgtcctcattgccggcgcctgcgtccgcaaggttcggccatgcccagttgccgttgaaccagaaggccgtcttgccgtccaccagatcgatcgccatctcgtcataatccgcccccagcggatctccctttgccacattgtactttttcagcacgtcaaacatatcgaggaactggcccatacggtcatagctttccagatcgagctttccatctttgatgtcctctatcgctttttctgcgccttccgaagtcccgtcatatgtttcatatatgtactgcagctgatgcgccccgagcgaccagtcttccttggccatggagacaggtctttcaacccctgcatccaccagtctgtcaagcagctttgtaaactctttcagagatctgaccgaatccggatcaaatgtctctcccagggcgtcgtcgatcactttcttattataaatgattcctctgccctcaatacagagcggaaaactgtatacctttccatttacctctgtcagataatctgccgcctcttcggtccacttttctccggacagatcggccgctttctcttctgccaatgcaatgacgtctgtcgtatccagaatggacagcgtcggcggagttcctgagttgtacaggcttacgaccttcgtgtagggagaatccccctctgtgacaggcatgacttctacatggactcctgacttttcctcaaatgcatccgccatcttctccagcgcaacctgtatctctcctttagaatttaatagggtgatatttgttccgttcagcgatgcatcgtactggaaagaatccacagatgtgtcgatcggctcttccttctccgtctcgttcgggtcgtccgggtcactggcaaaaccaaacctgcagcccgtcagcgtaagcgccgccagcgcggctgccacgctgagcgagactgcttttttaactaatctccttctcataaaactattcctccaaattaatcccgcagatgacaagaatatattctgtcctgtgttatctgcctgcctcagttaaacacagtaaccggtaaagtaaccggttactttatgatttaatcataccaccagctttccaaaacgtcaattcaatcctttaatttcgttatatttacttaattttccagctctcccttgtgtatatatcacaaaaccggttacttaactgattacttattgccttactgtttaaactctgttatactgtatgaagaataaatacttaaaatcgagggatattatggcacagagcaagaacgtaaccttcgccgatatcgcgaagtacaccaacttttccaaaacaacgatctccagatacttcaatgatcccaattccctgaccgtggaaaaccaggcgatcatttcagacgcactggagaaactcaattataaagaaaataaagtcgcccgcatactcgcaagcggtaaaacagaatttatcggcatcatcgtccccaatctgtttctgcactactattcggagatactgaatcagatattgtccacttacgaaacctttggctacaaattcctggtctttgtgggaaacgaaaatgaggagacagaacgccggtatatccaggaactgctcgcttataagatagagggcatgatcatcttaagccacaccattccttccatagagctggcgtccctgcagatccccatcgttacgatcgagagggaagacaagcacgttaacagtgtgaatacagacaattatatgggggccatacaggctacaagcctccttgcgcgccataactgtgatgttcttatacatatcaacccccccacatccgaggatattccggcctatgaccgtattcgcggatttaaagatttctgtgaggacaatcacttgaaccatcgtatcatcatacatgaaatggaacgtacccacgaatctgcaagcatgcatcttcgcagcattctttctgaactggaacaggagtattccggactaaaaaaggggatcttcatctccaatgacacccacgccaatatcctgctcaaccttatcgtccgaaagtacggaacactccccgatgactttcttatcatcggttatgacggatcgcccgtctcaaaagaggcggtcataccgatcagtacagtcggacagcagatcgacaagatcgccttcgaggcagtaagccttctagtgacacagatggacgagcgaaaaaaaagaagacctgcccctttaagggaaccggtccacaagatgatcacgcccgtcctgatacgcagggagacgaccgaagacagagactgagatccaggcccgtgacggatgaaatttcctctttcacgggcttctgttatccctgctcacacgttctttctgtacagtccgtgcctgttgcagcaggcatagatgaatccatgtccccgcttcgtgaatctggcctccgcgctctgctccggatacagcttgacaaactgcacgtgactcgaggtggcataggcaagaaatgaaagataatgtgttttgtccatctcgtgttccatgcagacatagaattccccgtccatatcccgcacctgtatctcatgccccgcacattcctcttccggctccatcgccggcaggagaattccgcagcagctgtaagagccgtttcccatagcctgtatcacatttccgcagagcggacatacgtagaatgatatttttttcatgtttcccgaacgattcctgttctctgcatattccccgttcagaagttctgccagagagacgccgagcgcagaggcaagctctgttatgatgcccacatccgggagcccctttcccgtctcccactttgatacggtcttatcgctgacacatacagattctgccagctgtctctgcgtatatccttttctttcccttaattcctttattatacttcctgtgacataactcatgatattacctctttctttttctgataggcttatcatacgccgccgggccatattgttcaacctgcggaacgtagagctgccgctgtgatatttattatcacagcggcagcattgtcatatccggtccggcggatccgtcagctgatgcatgatatccagcagccgcccgatctccagcggcttcgtcacatgctcattcatcccggcctgcttcgcccggtaagcatcatccacaaaagcattggccgtaagtgcgatgatcggaatgtccgcggcatccggtcttccccccgcagcggagaggcttcttatcgctctcgcggcgctgtacccgtccatgaccggcatctgtatgtccatcaggataagagcatatgtacccggaggcctggcaatgaacgtatccaccgcctcttttccgttgacggcacaatccgccgcaataccgttcatagaaagcagatccaccacgatctcccggttcagcatattgtcttccgcgagaagaacacgcatccccggcgcaaactcacgtaccggacggctcctgtcttcctttttcccgctgtccggaacaccttttgcctgtacgaactttaagtatacggtgaccgtaaacttcgtgccttcatcgagcctgctgtccacctgtatcgttccgttcatcatctggacaaggttcagggtgatcgccatgccaagccctgttccctgaatctgactgacgcgggagtcttccgcgcgctcaaagggcaggaacagtttgtcgataaactcttttgacataccgatcccgtcgtcctccacgacaaattcaaaacagcccactcctctttcacctgacagtttctcctccagactgaccgatatatgaccgccctcctgcgtatacttcactgcatttgagaggagattgatcaatatttgtttcagtcttactgtatcaccatacactgcgctgtgctttccttctttcctcgtcaccgtgtaatgctggcttttctgttcaacgtccggtctgactatctccgacacttccctgagaaagctgtccagcacgatcacatcctcacttagactcatattcccggactctatcttggacatgtcgagcacttcattgatcagtccgagaagatgtctgccggatagatcgatcttggacaggcagtccgcaatacgtttctcatcccccgtactgttgcgggcgatctccgccattcccatgattgcattcatgggtgtgcggatatcatggctcatccttgacagaaagtccgattttgcctgattcgccctgttcacagacgcatatgcctcttccagcgcgcacttcgcttttttctcttcctcataatattccagttctctttgcttctccgcgctgatattgcggaacgcgaatatggcagtcttcccgctgccgccccccgccgccgtcagatggacttccatccgtatccagtacgaagatgtcctgttcctgaattctacctccagatggccatttcgctgtgcaagttcccggagaatgctgtctctttcacatatatcggcaactttacctctgtcggcgtcaaccacatcctgcaggatatagccgtacaactcttcggaataacagccggtgcgcgccattgtattccccctgccggcctccggaagacgtacggcatagtagctgtccttctgcagatccacgtagaatatactgacatatacatcattgatcgcctgcagtgcagactgattcatgcggagacgctcactgctctccgacagcttcgatttcatcttgtgtatattattaagagcgcccaccacccggtccggtctgccttcctccgtcatcagcctgctgttcacccggtgccagacaaactcacccggacggcccccgggcgtagaacagcgcacctcaaatacttcagaacgtccgttgcatatattgtcgatcaccgtagctacatcatccggatgtacgatctcatgtttcagcagctccttcgagtaatctctgatctcgttccggatgaccccctgtccggtcctcggctcataactgatgaacctgtcttcgtccatcagatattcaaacatcactgctgaactgacctccatcgccacccggtacatctcatgctcccggtcaagcctctgctgcagtattttccgctctgtggcatctaccactgtccgctgcaggatatcgtccccgtcaggcgtcacccctacgatcatactcgttccgtccatccagcggatggagccgtccatgcgccgcacgcggtattcgcagtccctgcggtctcccacatcctggagcatactgtatatatcatacagaactttccggtcttctttaaggaccgcgcccatcacgccgtcatgccagtctccgcacccggtttccatgtcggcgtaccccatgatctctatcaccgccctgttcagcgatatgagactgaaactattgtcccggtgcctgacaaaacgtatgatcccgcacggaacggtctcgtaaatacttgtgagaagaccggtctgctctctcaggcgctgcgcatcctcctcggaccgtgtaatatccagataaagactgttcaccatccagttcccgtccgcatccctggcttttttcccgctgtcgatgacccatttgaagcttccgtctttacagcgtaccctgtatttggtcgaataaacaagaccgccgtccttaaacgcctcggcacagtctgcaagcgccttcggcaggtcgggaggatagacgtttcccaccgcagagcctccggtcgcttccatgaactcttctaccgtgtatccgaaaagagccgccgcctctctgctgacaaaggcaaaggaatatgtatcgtcgtcattgctgatcttaagcccccctgcaatggaggacatgatcacctccagctgccggttcctctgtttaacttcctcctcaagacttgaaagctgctcctgaatatattcataggactgttttcctattttatccggaaatttctctccgccgaccatctcctcgtatgggtttgagcagtggatatgcgcacatttcagtccgtcctctgtctcctgaaacacgtatgttacccgctggtgcaccctaaggtacatcccggcgctcgggtctgtctcgatccacatacgccccgtcactatatagaccccgtctgccggacagacgacgtcatattcttcttctgatatgttacatttggggatggcgcctttgtaatttaagaaccgctccacacatgcctcccgccctgaaacgtattcctcttcccccgccccaagccaggaaatctgaggagcgaaacaggccgtgacgccctctgtatcattttcgcagtaatgcatatgcataagggtactggccagcttttttgcctcttctatatgtccgccgaatgttctgtctccttcttgtatcacactgttatcccccgcatttatttccctttttctgttttcatgccgattccggtcgctttgtcgttcctgagtctccacgcggtacagttggatagtatttttttcagctgttccatcgacacaggttttgacagatgtccgttcatgcctgccagactcgcctttctgacatcctctgcaaatgcatcggcagtcagcgcgatgatcggcagctcttcgatccgctccattccgcaggcacgtatctttttcgcggcctcatacccgttcatgaccggcatccgcacatccatcaggacaacgtcataatagagcgccggatgggaacataccgcgttcactgcctgttctccgttttccgcgctttccacctgtgctccgagcagcttcagcatctccccggcgatctgtctgttcagctcattgtcctccacgagcagcacacgaagtccggcaaacacctcgctgtcacaatgggtttctgccggtttcgccagcgcggacgcatcacacttcgtaagatacagagttataatgaattttgagccttttccgtactcgctttccacctggatatctccgtccatcatagagaccagattcctgacgatcgtcatcccaaggcctgtgcctgcgattttgcttatccggctgtcatccgcacggctgaaaggctcaaatatatgttctacatattccggtttcataccgatgccgttatcttcgaccgtaaactggtacgtgccgacctggttctcctcttttttgagttcccgaagggagagagaaagcatccctccctcttccgtatatttggatgcattggccagtacatttacaagtatctggttgattctgcccgcgtctgcaagcacccttgcatgtatctctttttcaacatggaccacaaaggtctgatgcatcttttctgtcgtcactcggaacatttctgccacttcatccaccagttcacagaggtcagtctctttttccgccagctcaaacgtaccgctctcgatcttgctcacatccagcacctcgttgacaagcgacagcagccgctcaccggaaccggcgatcgtcttcagatactccttgatcttctcctcattgcctgtattcatcagggccagttctgtcattccgataatggcattcatcggcgtgcgtatgtcgtggctcatcctggatagaaaatcactcttagcctggccggtccgctccgccttttcaagcgcctcctccaatatctgctttgttctccgctctttttcaattgtctcttcctgtatccgccgttcctcatcgatatttctggaaagcgtgatctctatcagatcatccgtatggggactttccactctgaccacctgtgtaaagttccagtgatatactccgtccgccccgagatgaggcacttccatggacacgatgcgctcaccgccaagatacgtatctatgagcgcactgcgcctgaacttacctataaattcactgcggtagtcaggatgaaccgtgtccagttcaaatttgatcagatcgtcaaaacagcctgtatcctccggcctcttaacctgagaccgctcatattcaagcatgtgataggtattctgcgtcagattgacggcgatgagcatctggtacgccgcttttgccgctgtcgcaagctggctgatctccacgttgagctgctgttccatcagaaattcttcatggacatcgtgaaagacgagcacgcaccagcagtcctgctcctcacggccgatcttcgccgcagcaaactccgccatacggtagctgccgtcaggagacagacgccgcagccgcttcgtgatcctcttttttccattcttaaatgcctccagcatcgcctcgcgggaaaaatgtgcgttaaacgtttccaggtcatccgggtgcaccgccttctcggcataactgcggttttctgtcccaaaactgccctgcgacggtatgtctgaccaaagcatatctctctgacagttaacgtaatgatccgctgtcaggttggcgatgatgcattcgtcaaatacagtcacaaggctctgtgcgtacatatgctcaatttccctgaacccctgttcttcctcctgattcattctgtgcggggctgccgtcaccacaacggcccgtatgtttccatcccagttgatccgggttgcggtcacatcaacagtcgtatgaagaagaggatccgggcatatgatatggttggacgttctttcacccagcccctgcagggggcagcagccgcacacctccggccatacatcatggcatttggcgccgagcgaagcccttccccgcccggtctctctgcagcgcttattaaaatacagcagcctgtgtgtctcttcttcaataacataaacgctcatatcagtcagcgcatcgagtaattcagccagattgtcggcagacataggctcatctccttatcccggtcagtatccgtctaataatatatgtccattatacacggtaaaccgtgaaatagaaagctctttctaatgtcaccggcccggccgctctttctccacaagcctgccgacaaactctgtctccgggctgtaaagcagttcttcgggcgtaccgtactgctgtatctttccctggtccatcacaagaacttttgtgccgaggttcaatgcttccgatatatcatgtgtcacaaaaagtatggtgatcccggtcttctggtggatccgcttaagctctgtctgcagctgtcccctcgttatctcgtcgactgctccgaacggctcatccatcagcagaatatcaggagacgccgcaagcgccctggcgatgccgacccgctgctgctgtcccccggacagttcctgcgggtaccgccccctaagttcttcctccaggccgacgatttccatccacttgctcactgcatcctttgtcttctttttgttctttttattcagcagattcggcacataggaaatattctgctccactgtcatgtgggggaacaggacacttccctggatcgcgtaaccgatatttctgcgcagttcgatcatattctcgttccggatgtccctgccgttcacaatgaccgttccgccgctcggttccacaagtccgttgaccatcttaagtatcgtcgtcttgccgcaccccgacgaacctatgatcgtgacaaactctccctgttcgatcccaatgctgaatccttcaatgatcgccctgtctccatatattttctttatatcccggtattctatcgctctgctcataatgacctcctacctgagtagccccgactcttttaaaaactgttttgccacatccgccggctccatgccctctgcctcaaccttattgttaagctcggccatccgggcatctgtgagtattcctgccaccttgtcaaacacatcctgcagctgcggatgctctttcagcacctcggagcgcacgacgttaccgcacatataggacggatagaactgcagatcgtcctcaagcaccgtcacgtcggaggtgctgagctgtccgtccgtggtaaagatgatcactgcgtcgatcttcccctggttgaccgcctgatatttaagccctatatccagatccatcgtattgccgaaccggaacccatacgcgtcacagagcgcgtcatatccgtcctcccgctcaaagaaatcatactctgctccaaacgtaagcttatccgccaccttctgcagatcagaatatgtcttcagaccatactgccgcgctgtctcttttctcactgcgagcccgtacgtattgttgaacccgtacattccttcccactgcatgccgtatttatctttgtattccttctccatatcttcaaacagatcttccgtgtacagaccgttctttttcagcaccatattccaccctgtaccggtatattccggataaatgtcaaactctcctttttccattgcaggctggatattcgacgtgccgccgcccactccctgggtcacctccgactcaagcccggtatcctgttcgatcagaagactgagcatttctcccagaatatactgttccgtcatcggcttggtcgcgatctggatcgtgtccttcttatgaaagttcagcgctcctgccacgatcagcgcgagacagagtacggccgccgtcactttcaccgtcctgttttttctctttgcctttcccccagtgcgctgcatactcttctccgcgattccgagaatgaagtcgacaacgagagcgagaaccgcgatcaggagacttcccgccatggtcatagccgtgttgttcgtcgtaatgccgcggtagatcgccacgccaagccctcccgctccgataaatgaagcgattccggccagcgctatcgtcatggtgaccatattccggatacccgacatgatgaccggcatggccagcggtatcttgatcttatagagcatctggaatctcgtgcttcccattccttttgccgcctccagaataccggcgtcaacattcgtgatacccgtatgggtggcccgcaccatgggaagcagcgcatataccgtgagcgcgatgaccgctgtgacattcccgacccctgaaaacggtatgagaaatccaagcatggaaatggacggtatcgtatagagaaaaccgatcactccaagcgtcggccttgacgccctttcgtattcgctgatcaggattccggcaagtccgccgaacataatggcgatcaagatcgcgatcagtgatatctccaggtgttccagcagcagttttgcaaagaattctctgcgttctgccagcatattccatatattctgcattctttataactcccttctctctactgcccgtacaggacagttctcataacaaagcccgcagtgcaggcagtgttcctgcgcgatctcacaggacgttcctttgcggatacactgctgcggacagatattttggcagaccccgcacccggtacactgatccgtgatccgataaccttttgtgatccggccctgcttcccgaggacaaacgattcccggaagatcggcgaccgtcccagatcaaagaactccagctctccgtcttctatacagaatgcttcaagtatgtatctgctgtctccgggatatacgtctttcatagccggattttcctcaaaaatgcggtcgatcttctcccgctgctcttttaccctgctcacctttccgctgagcctcaccatctgataacttttgttcatgcctgtaacggccgtctccccggattccgtcagttcccggtaaaaatttttccctctggcggtgcagaagaacagctttccttcctctacaagcattatatctattatcctcacctgcggcttccctttttcgtcaaccgtcgcaaacgcaacgtccctgatctctctcaatatattcagacaatcctgtgctttcataatactgcctccccgtgtgatggtccggccgaccgcaggcttttcaccacatctgctatatccgcgtcaatgcacagcgctttttccgtgatctcctgcggcgcccacgcctggcctttgttcaggcagatataaaatgcctgttcatagtctgccgtcatctgccagaacggatacttgatgatccccggtgtattcatcccgactccaagttccaggaacaagatcttattccctctgttttttccgataaactcctcatacctgttaagtgcttcatgccacgctctatcctccacgaaataaccgtcgcatctcagatgtacttccatatctccgccgcataccggacattttgggatcagggaggaggggatcctgcagtctctctgccgcttcaccatttctcttacctgctcctcattgtcatatagcttatcatggcaggcctttgcgcactgaaaccggccgtagtctccctgggtggcaaagatccgttcttcatcaaatcccgcagcctgaaactgatggtccacattcgttgtgatcacaaaatgatccctgccctccacaagcgcgcgtatactcatatacagatcattctgctcctggtcataccggttgcagcagatatggcggctccagtaggcccacttttcttcctttgtcggaaatggatagaagcctgcgctgtacatatctttcaggccgtatctggctataaactctgcaaaatttctctgaaaacgctctcccgaatacgtatatcccgccgccgcggagagtccgctccctcctcctatcactacagcatccgcttcgtttatcttttgctttaccttttctccatgttccatcctgacacctccgcctcatatattacatttgctgatttccttcgctgtctatatcgtattccttttcgggagcttataaaagtacgcacttcaaagtggtatagcctcctttgggataccttgtatccaaaatataccttgcggcattacgccatgtattttataatagacgtacagatatgaatacactgcaaaggagaaaaccatgttgaaggatattcctgaatgccctgtagaaatgacattaaaattgatcggcgataaatggaaggtgctgatcatccgtgaccttctgggcggtacaaaacgctttaatgaacttatgagatccgtcaccggcatcacccagaaggttcttacgggccacctgcgcgcaatggaagcggacgggcttttgacacgcaaagtctatccggaagtccctccgcgggtagaatacaccctgaccgacaccggatacagcctgaagccgatactggaggcaatgaccgaatggggcaacagttataaaacgtcaaaaacaggcactgcacattaaaacgtacagtgcctgtttttcaaagcacagccggtccggcctctgtcttttattgctgcggtttaataaataggtgtgttccattctgtcccctgctcctctaccactgctgtgccgcttttacggtttcttccacagcagtgcgccactgctgttccctgtcgatctcctgtatatccatgccctccgcgcaaatatactgaaattcaggaataccgagcattttgcagacggctttcaaatacatgcttccaggttcattttctccgacaaacccgccggcagtctgtatatacataaacttctccgcgctgcatctgccaactgctcttggaccctcataggcaaaagcgatgccatttacaaatatatgctctatatatacctttaacatggaaggaaacgaaagatcccagtatggcgcagctgcgacgatcctttctgcgtccgcaaactgccgggcatgatcgaacatacagtctccggtctcccctgcccggataagggcgttccggcgcacgatatctgcctcctcgaggggaaccagcttcttttctttcaaaacgagtgtctccacttcatattctggatgaagccttttcacctcatccaaaaaaatccggcaaagccgccttgtcttcgacgctccgccttctttcgtacagcagtctacaaataatactctcactctgacctccaaaaaaatattctgttcctatattaccatctgcgccctgttatttcaaatgatactttttcatttcagcacagcggccgcgttacagagactgattgacaataaatgcggcaaacgttataatttttatattacaactgtaagatttaaggaggactgattatggctgccctgccccagatatcggaagcggaatacgaagtgatgaaaatagtttggaaatacgcgcctgtcagcacaacagaaatcacagagcgtctgacctccgccacggactggagtcccaagactgtacagactctcatcaaacggctcgtgaacaagggtgcccttgcctacgaaaagcagagccgtgttttcgtatatacgccgcttgtaaaagagagcgaatatgtgaaccaggaaagcagctcttttctgaagcgtttctacaacggcgacatcactgccatgctctccgcctacattgaggatgacagactgtcggcatccgatatagacgctctgcgctcacttctttccaaaaattccgcaaaaggaggcgactgatatgtttcccatcatccgttttctcatatgtaacttatttatcgccattctgaccggtatcatttttgcagtcaggtacggattcaaaagccagttgtctgcccgcaggcagtaccagctctggttcctgctgctcggccttctagccgtaccgttcctccccgtacagctgcccggatcaggccgggcggccgcatggtttacaaatcttggcagccgctcgccacacgatctctctccagcagccggcagccccggggcggccggccagaccggcgctgccggctggatcagcgattttagcatttctgtgagcagaaatgccccttcgttcactgagacgcttttgttctttatctggctggcaggcatggcggtcatgcttttgctgctcatcaggtcgtatttccgtctgagacatataaaacgttcctccctgccgcttcagaaccgtgacattctcgcactctacggcagatgtctccacgagacgcatatccgcagaaacatccctgtccacagcacggcctttttaagatcgcctgtcataacaggcttcttaaagccgtgcatctatcttcctcttcaccttatctccgactgtgacccggcagacttgcgctacatgctgcttcatgaactccagcactacagacacaaggacgcggccgtgaactatctcatgaacatcgccgctgtactgtactggttcaacccgtttgtctggctagccttaaaggagatgcgaggcgaccgggagactgcatgcgattccgccgtgctcgagatgctggagacaaaagactacgaggattacggccatacgcttatcaactttgcggagaagatatctcttattccgttcccgtttgcctccggcatgggcggcaatatgaaacagctgaaaaaaagaatactgaacatctcttcctaccgtccggaatctgcctggaggcggatgcgcggcatatgcatctactgtcttacagcgctgcttctcctggcggtcgtccctgcgctctctacagacgcggccggggaagatatatataaatttgacaaaaaaggagaagacatatcacatcccgatctttcttcgtatttcaacggatatgatggtactttcgtgctctatgacacagcggcagacgcatggcagatatataatgaagaacatgctgctctccgtgtgccgccagactcaacgtataaaatctacaacgccctgctcggccttgaaaccggcataatctctcccggacagacgcagatgggatgggacggcaaaaactacccctttgaagaatggaacacagaccaggatctaaacacagccatgcgcgattccgtaaactggtacttccagtctctggacagacaggccggaccttcggcgataaaagattatctgcggcagatccgctacggaaatgaagataacagccacggaacagatacctactggctggaatcgtccctgaagatctccgccatagagcaggtacagcttttgaagcggctttatgattatgacctgccggctgaaaaagcgaatataaacgaagtgaagaacgctcttttccttcggcagaatggagaagaaaagctgtacggaaagacggggaccggacgtgtagacggccatgatgtgaacggctggtttgtcggatggcttgagcgcactgaccgtacgtatttcttcgccgtgaatcttaaaaggagttcaggagccaccggagctttagcttccgacacggcgcaggccatactggcggacatacaatgatccaccattttataccggtcagttccgggatgatccgccgtctatatacacttgacaaatcgtgcggaccattctataatgaacattgttcatattggtgatgtgaaaggaggaactgtccatgaataaagttgcgacttcaaaagaagcgatccttgcagcgtcccgcactattgtgatggaaaagggaatctccgccgtcagtatgcgttctgtggcagacgcctgcagcgtcgcggtcggctccctgtacaattactttccgtccaaagcagatctgctcagtgcagcagtggcggatgtttggcgcgatatctttcatttgtccggcgactgtacggcgtgtgattctttctcatcctgtctcgccctgctctttgagagtatccgggaaggctgcgccaagtatccgggattctttacctttcactcggtaacattcaccgcgggagataaagaaaagggacgactcatgatgcagcagtatttcggacatataaaggaaagcctgttgtgtgtcctgaagaacgaccgcatggtacgccctgatgcgttcaacggcagcctgaacgcggaaaacttcgtagatatcatttttacgttatttacgtccatgctcctgaaagagcagtacgattataaaccggtgctcgaaatagtggcccgctgcatatactgacacattcccgcagttcaggcgggaaatttttacagtcaatactgaacatcgttcatatttggaggtgataaagtgaaagtaaaaaaaagaacgcttctcctgctggccggacttgtgtggagcgccgcggggtttaatatcctgcgtatcgggatcgtctcatacagcggcaatataagtgcgcaaaatctcttcgtatcatgtgttatatttgccctgttctggttcctcgtattcggcccgctggtgaaaaaacatacgctcaggatccgtcaatataaggaaatcatgcagttttttctgaagttttttgacggaaaatccttctgcatcatggcttttatgatgtcggttggaatcggtatacgcgtatccggcatctgccccgacttatatatcgctgttttttataccggactcggttttgcgctgacactggcaggcctgtcctttacatggaattacttcagaggatcaaaaaacgaacagacaggaaaggagatatgtgaacatgcaggcaattatggaaacatcgtttgacgccgtctatcttattacagtgatcacccttggaattgtgatgatccgaaggagcagggggataaagcagtatgtgctcttcggcgtcatggccgtaacactcggcgccggcgacgcgtttcatctcgttccccgtgccttcgcgctctgtacgacaggtctggaagattatactgctgcccttggtatcggaaagttcatcacgtcagtcactatgaccattttttatatactgctctattacgtctggcgtctccggtaccgtgttcagggacatatggcgctgacagcttccgtgtatgtgctggctctggcgcggatcgttctctgcctgttcccgcagaacggctggacgtccgccgacgcgccgcttagctggggaatctggcgcaacgttccctttgcccttatgggacttctcatcatcgtactcttctataaagctgcaaagacacacggcgaccggccgtttaggctgatgtggctgacgatcgtcctgagcttcgcgttttacattccggtcgtactcttcgccgacacggtcccggccgtgggcatgctgatgattccaaagacatgcgcgtacgtgtggaccgtacttatcggttattgtgacatgaacagacatttgaaaggagcacatataaaatgaaaaaattatggcgtatctcatttatttattttcttgccggcattgcctgcggcgtattctaccgtgaatacacaaaatatatggcgttcagcggaaggactgctctttcgttcacccatgtacacctgatcgtactcggcacgcttttgttcctcatcctcatgctgttctgcaaagattctgcgctggcagacagcaggaagttcaagctcttcctcatatcgtacaacatcgggcttcccctcatggcagtcatgctcttcgtccgcggcatcacacaggtgagaggactgcccctcagccgcggcgcggacgcggccatctcagggatcgcagggatctcacatatcgtgatgaccgcagcgctcatcgtattaatgcttgccataaaaaactgctttgccgatgcagagcagaaagactgacgccgcacggctactgcgtgctttcataatactcctgccactgttcgtccgtcagcctgtccatataccattccggcgctgcattttcgtccgatgggatcacatggtttgatacatactcataagttccgtcttccagcggtctgaccactacctcgtggctgaatgccttttccatactttttttcggccagaccgcgttgacggtgagcttgaccgtcccgtcggccttctcttcatacgctgtcacttcgggaaagggtacatccggtgtcgtacccttgtcatagagccccctcggcctgtatctgtatgtgccgtccgcctcattgaaatttgtcttctgccggagcgtcctgctgtctatccggaaatacgtctggaaaatgtcttcaaattgtgccgccggcacctcatatgtacggcccgtaaaggcaaattcataaggcgctgcctctcctgtcttcagtctgtacagcctttcatacagatcgtagaaattcagttctttgtactctgtctcactccagtcctcagtaaacatattattctgggcatatcctaccggtatgagatagttccggttcagttccctgcacgtatcatccagcggctccagacgcaccgcgatgcgccctccgcccgttcccgtcagacggttgcgctcaaaaaacagataacccttctcattgtatatccatgtcccggtcgtatattcctctctgtactccgataccggagtattaccgtcccagtaaagagaactcttttccacatccacgctgccttttgaagtcttcatatcataacgtgtgaagccgccgcggtcattgaccgcgagtatggtcacaccggctgtcttcttctcttcaacccggacagcaaatgcccgtactttatccggattttccatattgatctgattggcgtaatcaaaaaccgcgtacccctcttttccgagacgctttacgatctgcttcgttgtctccagcgttcccactgattctttcttttccgctgtctcataaatatcgcggtacttttccgcgatctccaccgattcctcaaacagtgtccggctgtcttctttctgcactccggccgccttttcttcagtagtcctgccgcaggacgctgtcacgagcgccagcagaaaacatatggttatcattcttctgcgtttcatgtctgtcacctctgtattcttacatttgtaatatttaaggccacactgcttccccatggggaagcagtgcagcggctattctgtcagatacgcatccagcacatttttatctttactgacaacataaccgctgccgcctgtatctttcacatcctccgtcatacttacgagaagaaacggctttttgctgtctttttccggcgtcagtacggcaaaccagccaagctccgtgccggatgtgtcttctttggacgcttttatttcagccgtgccggtctttcccgccagcacaacatcgtccctgtgtgccgcgtagccggttccgttcgggtcgctcacaacttttttcatcccttccagcacgcgggccgccgcatcttcggaaaacgcattctgtatccagatgtctttctgagcctcctccttatagagcagatacggtctgataatatttccttcattgcagaaagaggtataaatgctggccaggtggagcgggtttaccagtatctgtccctgaccgtaaccactgtcggcaagttggacttccgtctcgatctgatccgtattggaatactgcgaagcagacatggttatctcaaacggcatttcctctccaaatccaagcttttgcaggaaatcctgcaatgtaccggccccgatcttaagcgcggctttagcaaaataaatattgtcagaatatatgagtgcattttccagcactgccggggaatattcatgtagcgtcgtcacataataagaaccccatgaggtatccttctgccagctcagcccttcatttccaaagtcttcttccgggtccagcgcgccggagtccagaccgacggcggcagtgacaggcttaaatgatgatccgggacaccacacctggcggaaacggttgtagagcggtttcttttcatcttcgttgagcgcagtccactcttcgtccgacataccggtgataaatccgttattgtcataggacggtgtactgacaagcgccagcacctctccggtatatgggttcatggcggccgagcagctcttgtcttccctgaactgttcatacaatgcagactgcagctgtgcgtccaccgtcagctttatgtcctggccgtcctgcaccattacgcttgccagaactttcttcagctccccgtccccattcattatctctatgctgcagccgtccgttcctctcagttctttctcatatagtccttctataccgcttctgccgatgacactgttggatgtatatccctcgccggcatgcttcttcaggtcttccgccgtaacattctgcacgtaacctgtcaggtgggccgccgcttccttcagagggtattcccgcacctccacatctgatatcatgacacccgggactgcaagcagcttttcctgccttcctgcctcctgtgctctttcatcttccgggtctaccgccagcaggtctaattcacttactttgggaaccgtcttaaggggaacgaaggaatcctccttcacccactgcgcattaagctttttctctatcacctccggctcaaggccaagaaggccggcaagttcgctcactgcgccgtccctgtctttcagcttgccgggcacgaccccgacagaggaagccgttcccctcccggcaaggacacggccgttcctgtccagaatctgtccccgctctgcctctgtcacagagactttgaccttgtcttcctcctccaggccgggaaagatcagactgtccttccactcgagtctgtatccgtcctcttccttcacaaatgaggcagcattgtcaaaactgacgggcccggcagctgtgtcaaaggaagtgtgatacttcaccttcttctgcttcttgtcatacgctttcacatcgactttcaggctactgatctcaataccctcataaatcgcggaattgcgccggacaaattcttcttcacttatcttagccgcagtctttttatccagcatcgcatacatttctttatattctttttccggaatatgtttcatatatgtgatgagcagttcctgctgatctttccttgcgctgtctgtgtaaaaatatactgctgcgtatatggcggcagccgttaagaatatccccgcggcaaccgatagtattaatacaggtgtactttttttgtggtttttatttttgtaccgcatatctacctccctgaatgcttgaactcagtgttgttatatagtaatgcctgatcattttaccgtttaatactcttttttaaatcttacacttgtaatatttatgtgtcaagttttttctgtttccactaaatggaagcattatttatatttgtatgaatcaaggaggattgacatgaactttctgaaaaagttttttaacgaattgcttgaagatatctttgtaaatatgacgaacagactctgcgttcagctgcgtctcttctgcattgccggggccggcatctctgttataatgactctgttaaacgcagtaaaaatggaataccgtctcggtctcgagacaggcgtcagcgccatcgtctgtattgttatatatctttacacggcaaaaacaggcagataccttgccggctctctctgtatggccattatcctgctcgccatgttcacactctacgtgacaggcggccttgtggaaggattcgcggcactctggttctgtctgtacccgttcatctgcttctttatacttcagatgaaaccggccattctgttcagcggtatcggcctgtccgttctcatcctgtttttgtggacaccgcttaatcatatccttccgcctgtctatacgcaaaactttctgctgcggtttccgtttctctacatcggtaattttgtattctcgctcgccctgaacggcttctacgtctacacatacggcagacttcagcagctgaatcagaagtttgaatatctttccaatcaggacgggcttacaaaactgtcaaaccggacttatctggagcggtataagcagaaactgatggacagcagaaatgcagagcttcacgcgctcatgctggatgtggactgtttcaaacagtacaatgataactatgggcacatggccggcgacgaagtgctcaaatctgtggccggcgtcatcaacggactcacagcagacccagattccatcgccgtgcgctatggcggagaagagttcttgattctgctgcaggaggctggccagaaggaggcggaaactttcgcaagaacgctgcttcgcaagatccacgatctgaaaatacctcatatcacgggggacggctacgtcagcgtcagcatcgggatcagccgccagtatgtcagcagcgaagaaaagtttctcgatctgttaaagcaggccgacgaagccctctactgcgcaaagcagagcggacggaactgcataattactgaatccggtgcacgtttatctatataggatgcccggattgacacgctgcaggccgtgtgatattttatttgttggttagctgtagctaactaattcaatgcctggaggatattatgaaaacaaaaaaatggatatcaatactattaggcgcagccctgtccgcatttgtcctggccggatgcggcggcagcggcgcacagactcccgccggtgagagcgatgccaaagagacagccggctcaaaaggagactacccgctcgtcatctctcacgccttcggtgagacagttatcgaaagcaggccggagaacattgttacgatcggctgggagaatcaggacacaccgctggcactcggtgttgttcccacaggtgtatctgcggccaattacggcaaagtgacagaacatggcctgcacccgtggaccgacgaagcatttgagaccctcggtgaaaaggctcccgtcgtgttcgacgatatcgacggacttgactatgaagcgataagcgatgcaaaaccggatgtcatacttgctgcatattccgggatcaccgaagaagaatacaacctgctcagcgctatcgctcctgtcgcggcgtatcccgggactccatggcagacgtactggcgcgaccagacgatcctcaatgccgagggcatgggcatgaaaaaggaaggcgaggctaaagtcgctgaagtggatgctctcattaaagataaaacagaggaatatcctgagctggcagggacaaagactgcgtttttctggatcagcccggatgacttcagtacattttacgtatatctgccatctgacccaagagcagcctatctgacagaccttggacttacgtttcccgacagtgtacttaagatggccggggacaccgaagacttctctgtgacactgagcagagaaaacagcgatgtactcagtgacgtagagatgatggtcgtgtacggtgacgagacactacttaaagcgcttcaggaagatgcgctgatgtcccggataccggctgtcaaaaacggggccgtcgctcttgtagacagtgcttcttcactggcaggcgcctgcaccccttccattctgtccattccggccgagatcgatgaatatctccgtctcttgtctgaggcgcacggtaagataaagtgagacggctgaaaacaatactcgtaagcctggcctgcatcttttttctgctgctatgtatacttgcatccataacctgcggggccagatccgtaggttttgaaaatattgccggtgcattgtccggttcagatgcccacgaggcccatgtcatcgccgcgcggatcccccgcacggtgttcggcattctggcaggcgcggcgcttgcggtatccggcgcgctcatgcaggccgtcacccgtaatccgatcgcagacccgagtatcctcggtgtcaatacaggagcttccctctttgttgtgtgcggaatcgcattctttcatatcaacaccggaagccagtatatctggctggctttcaccggagcctcagcgactgccgtcttcgtctacggtctggcctccttcggatacggaggggccacgccgcttaaactggcgctggccggagccgcggcgggcaccgcgctgcagtcgctcgtgaatacggtaatgctgccgcgcactcaagtgatggatcagtttcggttctggcagaccggaagcatcagcggcgcctcctggagcgatatccggctcatacttccttatctggccgccggttttatcctcagcctgctgctggcgccttccctgaacacactggcgttgggtgatgataccgccgccggcctcggtcttcacgtcacacgcacccgtgcgctggctgcgctcgccggcgtcctgctctgcgcagcgtccactgcactggcagggccgatcggttttatcggacttatgatcccgcatctgatgcggctgcttctcggcccggatatgcggaagatactgcctctgtccgccgtaggcggaagctgcctcctgcttctggcagatgtggccggccgcatactcgggcggcccggggagctggaatccggcattgtcacggcactggcaggcgcgcccgtatttatactcatcatcagaaaggtaaaggtacgttccttatgaaatcatctgactacaacacggccgcctcaggcttcagaagacggagaaaacagtatataagcgctgctgccgctctgctccttcttatgtttctgctggcagtctttatgatgacttacggaaatacagtctatacgcccggcacggtcataagcgttctcatggggaatcatataaaaggcgcttcttttacgctccttacgctcaggctcccacggctgcttgcggccatactgtgcggcgccgccttcggcatggccggaaacaccttccagaagctgctcggaaatccgctggcaagccctgatattatcggtgtctcctccggcgcgagcactgctgccgtatttggaagtcttgtactcggcttaagtggaaatgcagtttcctttctggctgtggccttcggactcctcgtctcaatgctcctctatgttctctcccggaacggagggttctcaggcggaaggctcatattgaccggtatcggaatgcaggcattcctgaacgccgccatatcctggatgctgctgcgcgcttccgaatatgacgtgcccggcgcgctgcgctggctcagcggaagtctcaacggcataggcatggaccggatccccggactggctgcggctgtccttacagccggcactgctgttcttctcctgagccggtatctcatgatactggagctcggtgaagcctatgccatcaccctcggcgtgaagatcggcctcatccggctgctcctcattctgttctcactgctgctcatcgcttttgccacagcagtcaccggccccatcgcctccgtcgcttttctttccggccctgtcgccgcaagaatctcggggagcagcggcagcaacacggcagtctcagccttaaccggctctgtcctcgtactggcctccgacctcgcgggacagttcgccctgccttccagatatccggccggagtgatcaccggtatactcggcgcgccgtatctgctgtttttactgcttcgcatgaatcggaaaggagaaaatgcattatgaatacccacctgctctcggcagacaaagttacggccggttacgacggccgggctgtcttaagcgatgttgatctgaccgtccctgaacacaagatcagcgtcattatcggcgctaacggctgtgggaagtccacacttcttaaaacatttgcccggcttatcaaaccccgggacggccatatcctgctggatgagaagacgctttcgtcctatccggcccgcagggccgcccagatcatggggcttcttccccagtctcccgccgttccagacggtatcaaagtggctgaccttgtcgcacggggccgttttccctaccgccgtctcttaaaaagcatgacggcagaagacttcagagcggtggaagaggccatggacataatgggcatcaccagcctggcggaccgaagcgtcgatgagttgtcaggcggccagcgccagcgtgtctggatcgccctcgctctggcgcagcagacagacattttaatgctggacgaacctaccacttttctggatatttcctaccaggtggagatacttgacctgcttactgatcttaaccgcagacgccggactactatcatcatggtcctgcacgatatcaacctgtccgcacgttacgcagatcatctctttgccatgaagggcggcactctgaccgcctgcggaactccgcaggaaataatcactcccggactgatgagggaactttacggactggaatgtatcgttatgaaggatccggtatccggtacaccgtttatcgttccaaaaggcagacatcacagcgggacggccgcgttatcttaaattgtccggagactgcacccggaactgtccgggtgtaagcccgcaccattttctgaacatattgatgaacgccgcctggctctggtatccgatcctttccgatatctcaccgactgaaagcgctgtatcctgcagcagctccacagcttcattcatccgtacattgttggcatgatcccagattgtctgctgatataattctttgaacccggccttcagcttctgctcactgatgccgagtttccggctcagttcatatatcgtaacaaaggaggccgcatcctgttcgatccgcttatgtgcaagcactacctttctgaaatcctcacctgtcattttgatcttccgcttcccaacctttatatattttgcaaatgactgtcccttactgcaaaatctctctctgttgtccggatgcagaagaagagctataaactcaagacatatggacaagtggagaggccctgtcatctttccttctctgagaagcttctccatacgcctgatcaggctctgcatctcctgtgtcagatggatatagcggatattgtcttccagaaaagaaagtgcgttctccccggctccgataaaaggaaacagcaccgacttcagataaactatctccacagacacctcaactcctttaaaccgctgtcctttcttccagcagttcactcccccggaggacttttccactgccagaaaaaccgaaggaacggaaccggcctccagccggttctccacaagagaatacgttattccctcatagatgatgccaaaatgcagatactccgtacgatactggtattcagcaagaaaatctgacggtacggtatagcagcctgccgacgactgtatcttatccaacgccccatagctgtatataactccattcccggggctctcccacaccgtccacgcttctttcggctgcgttttttgaagaccgatctgccggtagaaaagctcctggtattcctccggtgtctcagctctgtaatagttcattttcccgctcccctttccccgcctctttttcaagaccaagcctcctgtccaaacagttgcattttagttttgttttcattcattgttataacctcctggtctttattttatttatctgaacaggttttcttcctgcgcagacctatattgaacatatattcaatattgttcaataaaaaaaggaaccggcttttagcggcgggtcataaggaagtaaaatgtaataaaggagccatcgcaaacaaactgcgatggcttcaaagtattttgtattgtcgacaaagcgctgccaacctttctgaaacggatgcagcacccggcatagcaatgttcttttgccaactttgccaatctgtttacatcgccgtttcatcgggggaaatcgtttctatgctgtagaccatggcccacaatgacaatgttacccacatccgcttgcttcgttggagagccgccactaatctccacaggggattctggcggaggctccggagctcctgcttacccatgacgctttgtgcagcggcgattccgccagagcagcagggaggcgcagcccgcgagggcagccagcatgatgagcagccggggcagttggttcgccgcgtcgcccgtctgcgggatggtggaatcgttgatggcgatcgtgccgctggactgcgccgccaccgcaaagggcgacaggcttgaaaacgttccttttgccatgccgttctccaccttgatcgtccggttctcctgtaccttttccttgcagtggatcaggaacaccgtctgcccgttgtacttgtcctccaccgggatttccacatcgaggtcgccggtatagctgccggaggacaggccgatatcgtacagcacgatcagctcgcccttgtcctgtcgcgcgcggatgtcatcgcacaccttacaggagcctttttcatgcaggctgttctttttcactgccagaaccgcgtcgtcggtgaaagagccgctcaccttcacaccggtatcggggtccatgagcgtgcggtaggaataggtcgccccgggggcggggtcgccggaggaattgcgctcaatgctgaaattctccagcgtgaggtcggctccctccaaaaggcagatttgcaggttttcatagcgggtgcccgcccggccgatgatctttacacggccgctcactgtgacggtggcgccgttcaaatccagcgcaggcgcgttgaagccgctcacatccagcacgtctccgtctgtcagcgtaacaaggggccagttggtgtaatcggtgggcttaaaggttcctggctcgccatggttcgcaaagctgttgtcaacgcgccagccgcccatatacgcgcggttgtccaaaaacaagggcagtaccttcatgtctttggcggatccgtcaaacccgtctgaaaacgccccgggcggaacagtgccgtccgaacacaggttgtgcaccgtcaccgcgcccgcgacgccttttttggcgtgattggcgtccagcagctggtaggcatagacgccattggcgttcgccgtcacatggttgatcaggaaagccgtggcggggccgacggggaccccgatgccgttgaaaaaccggacggggtccgtttcagtggcgggccacagcgtgtctttatatacctcttccccggtggggatggtgaatcgcccgtcgcgcgacatcagcgcctcgttatagaacagagaggcatgtctggcggcctgaagctgcggcgtgaaagagccgtaatcggcgcgcagggtgcccgtgatattgccaagctggcccgccgtcatcacgtccaccggaaccagcacctcctgcttggtgctgtaaatacgcagccgcatgacggtgaggctgtttgcggagttgccattgggcagcagatagctgccgtgcagggccattgtctcggttatcaggttgccgttttcatcatagagcggcaaaaggccggcaagcccgctggcgtcgccgccggtgttgatggcttcgttggcctggttctggaggttgaccgcctcgttgattttggggtaggccgggccgctcgcatcgctccactcgctctggtcgtattcgcttttatagggaaacctcgcgggatcattgcccaggccgcttatatattccgcgtactcgtcgtctatgaatttggaaaacagggtgtccaggtagaccacgcagtacatataccgcgcgatgtacctgaagatagcgccggcgtcctcataaacggcaaactcatagatgttctgcaaaatggaggcgtctatctgagcttccaccagcgcgccgccgggctgcgtggtgctgtacaggcagcttgccagcgtgtggatatccttctcgaaggtgttgttggtgcccgattgtgcgccgccgtaggtcgcgcggatgtttttgataaagttgtccgtcagaaccttaagttcagcatgctgctgctgcgtgaacgcctctcccgcgttgatcttgtcctggaaggcgggggtgttcaaaaggtctaggatgttttggaggctttgggtattgccgctcagcagccggtccaggcgttcggtcactggggtgagttcggtaagggcctgttggtagtggacgtcgacgactccggtttggattaaatttttcagttcgcccatctggcccgtgatgagggcaagctcatagtccatgtcgcccagcgcggcttcgattgtgtccagttccgcccggaccgtctggccatagtatttggcggggttaaaaaattttgtgagtacgccggggtccgggctggcctgggccgcccgcatgccgccatccagcgcggcaaggcccgggcccgccagctttgccgccgtcgcggtcagcccaacggccgtgccggcgtcctcggcaaataacgtggccggcacaagtgtaaccagcatcgtcaccgccagcagcagtgccaaaaaactttgccttgttttcttcatttagattcccccttcgtatgttaattgatagattagaatagtatagcacaccaaacccaaaactggaatatctgattgtgcgagaaaaaagttgatactttttttgacgcctatggcatactgtttttatcaacacaaaggaggaagagtcatatcggagccaaagacgaattttgccatgctgcttcgtctaaaagctgatgcccggccacggctgggtggagaagtatagttcatcacagggagcttttcgtttttccgttcacttggcgtaagtcagcttttcttcatacttctttatggctcactgctattataagccgattccatataaatacatctgtatcaatgtcggaataggggcacgtccggcaatgccttgtgttatttatgctgttcaggccgcactgttcttttttctgccgcggctgccgcttttgcatgcctcctcatactctttcagcttttgctctgcctctcctgtcaaatgcttcggaacttcgatctgtacggtcacatactggtctccgtgcacatcaggatctttcatagatacgatcccctttcctcttaggcgtatctttgtgccggactgcgtgccttcccgaatcttgcagagtacctcgccatagagtgtcggcacgcgcacttctcctccgaatacagcagtcgtaaacggtatcgatgccgtcgtgtacacatcctgtcccttccgctcaaaaccgtatttctctcccaccgtcactttcagaagcagatcaccgccttctccgccattcacgcccggcattccctttcctcgaagccggatgctcttgccgctatcgatgcccgcaggtatgtgtacctgaagggactgtacggaaccgtccgccctctccatattctgaaagctgatgatcttgtcacagccaaacacagcctcgtcaaaactcaccgagacctccgcacgcacatcctgcccttttctccggtaccgggaacgtccaaatccgccgccaaaacgctgatactcagcgtcttccgctttaccgccgcggaatatgtctccaaagatatctccgaagatgtcatccatattgccgccctcaaaatgatactcctgatatgtgccgcctgtaccggcagcaccgcccgtacgccctccggcacctgctcccgcgcagctgccgtcaaatgcggcatgaccgaattgatcatacagttttcgtttctcagggtcacttaatatagtatacgcctccgtcacttccttaaattgctgttctgcctgtgcatcaccggcatttgtgtccggatgatactttttcgccagcttcctgtatgccttttttatctcagcttcctctgcatttttatggattccgagaatatcgtaataatctctttttaccgccattgctatcacctcactgctctatacaaagattcattttatatgttccaattgttctatatgtaatataacacttattttctttcaagtcaactttttttacagagacaggcacgtacaatgtcacaagaaaagacagggaatacctccctgtcttttcttgtgacatgtgtgttatttgagaagaagctccttcttttcgagaatcgcctcacaggcggcgcaggccggacaatcacagtattttgcgccctttgctttgatatctctggcgtgcgcagccacatttttggccgtatccgctccgaagaccgccgcgccggcttctgactccgcaaaaccgatcaaaccgtcgacaggcataatatcttcttccagttctgcgataaacttttctgtctccgccgcctcctggtccgttccgactgcatccagccatttcacggctgcttcttttgcctcggcgctgcacgtcgccgcatcttttaattcatttgccttttccaccacatagttcaatacttctttttccataatgaatcccttctttcctctgtaatttacttctattctaccatatttatcctgaaaagtataaaatttataatatatcgggcaaaaggcgggagataaagttttaccgctttactgccgctgctgtgggatcccgcaccggcccacagcctgaatacagaccagaaacatctgtcattctttattccttcttttatatacaaacggatagtgttctgctatgtacttatagcggaagcactctttcacatggtcattgatgataccgcacgcctggagatgagagtacacggtgacagagcccaggtacttgaaaccacgccttctcaagtccccgctcactttgtcggacagcccgtttcttgcgggctgctcccctctttcgtgtctgttataaaaaatagtctttccgccggctaatctccagagatattcgctgaaagatccgtactcctgctgtaatttgagaaaacatccggcattgtggataactgcttctattttccgcctggatcttatcatcccttccgcctcgagaatcctccggatatccccctcaccataagacgcaactttctcatagtcaaacccgtcaaagcatttgcaaaaaatctcccgtttctgtatcatcatgttccagttcagcccgcactgcatcacttccatcatcagaaactcaaactgctttctgtcatcatagagtggaattccccactcttcatcgtggtattttatcatcgcgtcattacacagacaccatttacaacgctccatctcttccccccttctgactgcctttcccatcagactactgctccgcccggacagcccagcgcattttcgttgagcgggcgcgcccgttctgcctgcactcctcctgcgacggccggatgacctcctttgatatctcactgtaaacgcctgactttgcaaactgcttaaatgactttttcacgagccggtcctcgcctgagtggaacgtcaatatagccacccggccgcccggggcaagtacatccggcagcttttccagaaaagaatataatgcttcaaattcactgttcacatcgatccgaagcgcctggaaggtccgctggttcgacttctttacggcttctttccggtctttctcagggagaaaagcaagcgcttcttctattgtcttataaagctgtgtcgtcgtctcgatctccccgcccttccggatcttttctgtgactgcttccgcgatctcgcccccgtatggctcatctgagttctcccgcagcatgccctccagttcttcctttgtaatgtcacgcagcctctctgccgcgctgatccccttctgcggattcatgcgcagatcaagagggccttccgccttatatgtgaatcccctgtccggattatcgatctgcatggaggagacacccagatctgccagcacaaaatcaaataaacctgcctcccgggacacttgatcgatcttggcaaaattctgcagctttaccgtgagaatgtccgggccgtatccgagcttttccagcctcttggccgtccggacagactcgatcgggtccacgtccagcgcatatatatggccctgccccttcaggcattccagcatctttgacgtatgcccgccataaccgagcgtagcatcaagccctctctgcccgggccggatctggaggaattccagaatctcttttacgcagatagaaatatgcattccagccggagtgctgcctttttggatgactctggataccgtcttggcatacttttccggctgatgctctttatatttttcttcaaatctctttggatacgcgccggaatatctcacccggcgtttatgcttcttctctcgatcttccattttggtcttcctttgctatttactgataataatgtcagtttcagtttatttctttctatatgcaaagtcaatgacttatcggcgataatggacagggcaacgcgaaaaagtaccggtcagtattctcctggccggtactttacattgtatcttctgctccgcagatatccgcagtgcatatgccttgtgccactgacgctcactcctttgtcagatcaaactgcttcagaatctcataggcatctatcatccctgcaatataagaatttacacggtagtcatattctgtctcttcctttctggagatcaaggtgttgactgctgccctctggtctgctgtcaactccaactttctgactgcaataaatgcctctttttcttcttcaagccttttctgaaaatccgcgtcgtttttaagcaattcatctaacgtccggttcttcatactgtcggcggccagtttcaacagagcttttatattactcatatgactctcctttggtctgtttatgattctatatcttcattatattatgccgtcatttagccgtcaatataattttaaacgccgccgtacacactgcacactttattttttcctggcagaaaaacaggaagcccaaattacattttgcgccgtcatgttgacgtcaaccgagaatattgccgtcagtcagacggtataataatggcatattcttactggaggtctcatattatgccatctgatgttatcaaatttacggttagaaccgacgctgatttaatgaaacgatttcgttatatcgctgaatacaacgcacgttctgccaatcgggaattagaagtcttaatgaaaagatatatagctgagtttgaaaagaagcacggaaagatagacttggaataaagagaagggattactgtaatctatggtaatctcttttattttacagctgctcttcctgatcatattcctgtaaatactgctgcgtctcataaaaataacggatcatgtacacactatagttatcaaaagaagaaattggtcttcacaacagaacagagagggaattatgaaatttgacgcagtttactatgaaccggacagtctttcctatgaacttggaaaacagcttaaaacaaaatttgcggatttaccatggatccctgtagacagccataattctataaaagaaatgcgggaaaaagaaaattccgagttcggaaaaatgaaacgtaatctgatcatcggcatcagaaagacacataagtatgtggagaatcacaaagtttccgactacctcgtcccctatacatcttcaggctgtacagccatgtgtctgtactgctatctcgtatgcaactataataaatgtgcctatctgcgcctgtttgtcaaccgggagcaaatgctggaccgtctcattaaaaagggggccgccagcgataaacctcttacgtttgagatcggcagcaacagtgatctcgtgctggaaaatacaataaccggtaatctccaatacacgatttcccggtttacagaggaaggcaccggcagcctgacatttcccacaaaatttgatatggtagacagcctgcttaacctgccccacagaggaaaggtgatcttccgcatgagcgtcaatcctcagcccatcattaaccgcgttgaattgggaacttccgatctgaacagccgtataaaggcggtcaacagcatgtgcgaggccggttacccgtgcgggcttttgatcgcgcctgttatattgacggacgggtggaaagcaatgtatacggagctgcttgagcagcttcgcgccggactgaccaaaaaaatgcagaaacagatgtttttggagataatcatgatgacttattcctatatacaccgcgctatcaacagcgaggcttttccgaatgcgccggatctgtatgaccgccagcttatgaccggacgcggaaggggccggtattgttataagccggaggcaagggctgaggcggaggaatatctgcgctcagaagtaaaaagggtgcttggggatgtgaagatactgtatataagctgatatatgtagctgcagatgtcccggggatcgcacatcacagccgaacagcattcagtttgttctttctgtttcaacgggcggtgctcacaacaggctgttctttcttatcacttgtgatatttttcagccagccatactataatacagaacgttttgcccattctgtcctccagatattcttttaattcaggccttacctctgtcttcacttctgctttggcctcatcaatccatcattttaattttccatactcttcgtccgggacagcttcgcaccattttgtggaaccattctctgccggaacctctattgccaagtgtgtaaaccaactgtccggtgccgcgccatgccagtgcttcacacctgccggaatgtgaactacatctcccggctgaagctttcttggctcctttccccattcctgataataaccgcttcccgcagtacaaagaagcaactgtccgccgttctgatcggcatggtggatatgccagttattacggcagccaggttcaaaagttacattccctatcactacctgctctgtagaaatcatgttcagataactctgtcctacaaagtatttggaaaacgcatcatttttctcccccatagggaatatcatctgttctgttacttcctgttttgtactcatatttttctctccctcctactgttcgtaagttcctttatatactacaacttgaagttaggttcaagtcaacaactattccacctcttctaaaagtacggcgaaaaaaagtgccctgccctctcaggcatgacactttctctgctcctaacttttatgtacatctatattatgcttctgacattaacagttggtattgtcttttatttttctgattttatgtctatcacgacatattcacatttttcctgtgtacggacaggaaatccccatccggtagcgccggaggatacgatcaaagtgcatccctccttctcatattttccatagttcggttcaagaaaccagtctgtaaaatagcctgccggaaatatctgccctgcatgagtatgtccggacagctgcagatccacaccgagctttgcattttcttttgtctcaacaggctgatggtccgccgttataataaaccggtctctgtccgtaccttttaataagtcttttgcggcagcccgccctgacattgcagacacatcgtttctgccggccagaaccatctcttctccgactggaacccagctgtcacacaaaatagtgatcccattagattctattgccttctgcagctcctgtacggtataggtgcgtgttcctaacgccgcatctgcataatactgccggtcgtgatttccgtacacatagtaagtgccgaaggtactcttaagcccgcccaatacacgaaagacctcttccatagatttttttgatgtgccctcctctacaatatctccgcccagcacgatcagatccggctcccacgcattcatttcctctattttgctcttcaatacatccggattctgaaccgtatcatagtgagtgtccgtaatcaaaatcactcgatagtccgattgaatcttatctgtggaaatggtatattccgttggaacaatttgtcccatattgtaagctccatagccaagaatcaaacatgtgagacaaacaggaacaaggccgctgcggtaaattctgcgggcgatccggaaccctctttcttccctgtgctttctccccgcgcgccgtaacacaaaagcgcctacatccatcagaaagaacagaaccatcaagtgcagggcaatgagaatcgtcattctccacaacaaacacaataatgccacaaccaatgcaactccagcccgcagcagccggatgttccggttctttacacagactccgaagagcgacagccatctgcctgccagccaatacagtccggatgccagtaccagcagcatccctcctaaaactaatataaccacagcatttttgcccccttttccccagctttgcaatcacctgtgacacagcggacgaagttacgctgtctaagatttccttctgaacatctctttgcgaagatcccgaaaatcctctgccgtaaatccttcctctgtggacatgatttcatatctgacacttcttatctttatatattgctttgtttcgtaaaatccattccgcttataaaatgctatgcgccggcgtctctgttctgcattttcagcactgtcatccggttcctccacctcaaggatcacaggcctgtcaggatatttctttttcacatatgctaatatccgtgaaccatatcccttacttctcatattatcatcgactgcaagatacatgagccaaacacctttttcccgcacaatgctatataaaaagccacaaaactgctccccgtcatagtacgccagcccgtcaaaaatgtttaatacagccaatatctgtaaaattccggcagggaatcgttcctctttcggaaaagcccgtttatacagagccttgattttcttataatccggcaaatttctgtgaattttctttacagtcaacttcatgttctacctctgttctccatttactcacatataagcagttatcgacatattctcgctttacagatagaatactcggttcggcttaatctcggtcttttctttttctgcagccgcatggcccagaatgcagaagccgataccttcaacgtcgtctgtaataccgcatttttccagaatcttctttccttcctcagtgtcaaaaacctcttttgcgcggtgaatccagcggctgtcgattcccatgctccaggcggcattcatcagattgcccatcgcaagactgccgtcgtaaatatatgtaccgccttttttgtctgcgacaacagcgatcacatctctggcgccatagaacggatctgccgggaaattttcagccatcgcaggatttatctttgccatcgcttcctttgcaatagccgcattcaggcctgaaagccgctttacggtctcatcatcctgtacagcgatcaggcggacacactggctgttcatgccggaaggggcgttcaagcctgcctcaataatctcgtcaagctcctcacgtgaaatatgttccggtttaaaatcggaacagctcttacgggtaacaatgttttttacagtttcattcatgacagatcctccttaatatttaagaattatgaatcaaaagggttaaccttatgattttattattgccctacaatgttacgaacagcccccggatcatatcagtaaaaactttttggatgatttccgggcattcctggtcatacttcaaattcatatgaaacagactggtcagcactgcctccagccggatatcattttccctgctgacttccaacggacaggattcataaatcttcttccgcagcagtctgatcagacacggtttggacagtgacatgtcccggtgcttaaatagacggcggcagtgggcaatcttctgatggacggtattgcgcagtttcttcagaaacagctccggctgtgagataaaaagcgggaaataatcaatggacgcaataaattcatcaaaaaatgcctgtatcagcttatcgtaaagatcgtcgatgttctgaaaatggaggtaaaaagttcccgtgttgatcttggctctgcgcgaaagttccctgactgttatcttttcagccggcagttcatccagcatatccagaaaagacgactctacggcttccattgtttttataactctcagatcattttcattcattactttctctcctgctctgctaaagattcgtaaaagacctgctttgctctgtttaaagttaatagatatgtgtttattatttaacttatgtttattatattgcgggaatatttttctgtcaatctcttcttttatgaagaaagcgccatcccctctcaggtacggcactttcttcacttattaccacactcccattgtatttttattcttccaacattacgaggtaactatctaagcggtcattcacatatcctgcaaataacttttccattgctcctaaattatgttttacatggtattcatcaaaagcattgtaatacgaaatcctatctgtaaacttaatatcaatcggcggatatccggctttcattaattctaaatttacaagcaaacgccctgtgcggccattaccgtcaataaagggatgaataccttcaaattcaatatgaaaccgtgcaagccggggaataatatgctctttactattgttatagaactccaacaactgctccatctttggtttaataagatacggctgcgcaggctcatgctttgcccccataattcttaccggaacccttctataaacaccgcagtcatcctttttatcagccagcaccagataatgaatgtgctttataacacgctccgacaatggttcctgatctttcacgaggtcccgcacaagatcaaaagcttctttatgtccaattgcttccatgtgatccttcaatggcttctggccaatagtcagaccgcgcagcaccatatcggtttcacgcaacgtcagcgtatttccctcaatggcattggaattataggtatactccaccacaaattcctctgtcagccgttcaacctctccctccgtcaaagggcgtctggaatccaattctgttttcttcctgtcaatactttcaagcagattttctacggacttatagcgtccgtcttccggtttcccagcctttgctggaatcctccaactgcgcccctcacggataacgcctggaattttaccttctgaacataggattcgtactcgtctatctgaaatgccccatttctctgaggcctgttttacggatatatacatcattctacacctcaccttaaacaatagtataccctgttttcggaacaatagcaacgccaccggaataatacttttcacctatcggaataatacaaaaaaatccggaggatacaactttcttctccggataaatattatggccacctttgggaggtttgttttataatagttccggtcggtgatcgtccacgtacccccgtcggtctgcccggttattgtcagggtgataatcgcgctgtacggctgcataatccaattatagaccgcctcttccaaagaagcgtagttatccaggcacaccgttgctctttgattgtcccttccgccgttcttccccggcccgaaccggctcacctccaccgtgacggaaagctctgtgagcagacccagcgcgttctcgttttgggcgcattggcaatggcatgtcaaatcggaaactggaacagcagattttacgagaaaaaagttgatgctttttccctcctgtggtatactgttctcatcaatacaaaggaggaagaatcatgcgggagccaaagacaaattttgccatgctgctgcgtctgctgggtgcgcgcccgtgcgacgtctgcgaggcagtgggcgcggacaaaagccttgtgagccggtggtgcaatggcaagcaaaagctgatgcccggccacggctgggtggacaaggtggccgactacctgatcctgctggacgggcggctgcgagaaccggtgctgagagaggtactggcggcctactatcccgacgaaacgctggacacgccggagctgcagcgtgttgtacttctggagtggctggcggcgttgggacatctgccggcccagcagcagacggacaggccggggctggccggccttgtgatggccagggcggccgcgctttccacgccacagcctgcccccgcaccggtggaaccgcctcagccgctgccgatgaaaaatgccgtggtgtacggcagaaaaggggtgcagggcagcgccttgcagtaccttgacctggtgcttgcgcaaaccgaaccgcaggaaatcctgtacgtctgcccggaaggactggatatgtacacgcgtgatgaaaaattcggcgcggtactgatggacaggctgatggaggtgttcgcggcgggacacaccctgtcggtagtgctgcgcaccgattataaaatgacagacgtttctgccttttccgggcggtggctggtagcacacctgctcggctacgtgcgcagctattactttgatgagtttcataaaacctacgatgaaaagatgctggtggtagtgcgggacaagatggcgatgaaagtgacggacaacagacagactgacgacagcggtgtctacactgccatttacttcgacaagcccacggtggagcagatatggcaggagtgtgcgggctaccaaagccggtcaaagcagcggttccattaccatctgttcgagcagccggacggatatctgcggggcgtgacgcctctgccggacagggcgcactatcagttcgtacggctcccccatttcgggatcaagggggcagaatgggggcaggaggatttcaacatcaccgatgcggaacgcgaaaaactgcttctggatttcagcccgctgtgcgtgccggcgtcgtattacgaagcgcagaccccggtgcggtatctgtactgcgaggatgatattgaggacgcgctgttaaagagccggcacgtctgcccggaactgaccgccatgctggggcggcgggtggttatgacgacgcagacgctggtcgaccgtctggcgctgttgaaaaaaatgctggagcaaacgaaagattttgaggtctgctttgtgcgggacgagcactttaaaaagctcaccatgcagatcgcctgctggggcgatgtagcggccataggctggatcgcgggaggcaagagcaccgcctgcaaggactacactaacaccaatgccctcaccggcttttgtgaatccatctgggccaagatccccaacataatgaaaagccgccgcgcggccttgcggaagctggacacatggctgaaaaaggcagcgaagtacgggtatagagtggagtagaccgctcgttggtgcgctaccctccccatgaccgctgtctgcggtgacggctgtgcatcctgcggatgctgaaaaagtgatacgagccggcagaatgacagacacgcaaaaagctccatgtgacgatacttcatcacatggagcttttcatttttccgatcacttggcgtaagtcagttctttcctcatacttctttattcattttctgcctgtgcaagagcctcaataacagaaatcacctcccatttatgaaaaccaatctgattttttaaaataaatttctaccgtattttattccttcctcaaactcaattcatctatcagtctactattcgcatccttaaatttatccttatttattgcataatcagttaaacgcatttcaaaccataatccaggacttacggaaatttccgttacatcgtatttaatttgagttgctaataaaacatattctgttcattataccgcctacggtatctcatttccaagttttggcaaattattcaattttaccttctccaacgtccgcaactgttgtactgttaactgccggagtaattccattctttctttttgcttctttccctgattaatcaaaacagcattataactttccagatttgcaagcaccagtaattgattcagcgttgctacatcccgcatagttcctttcactgttggattttcatctttccattgcttcgcggtctttccaaataaaacaacattcaacatatctgcttcattagcataggtatacgccacctgtgcgggcgtcaattcggttgggatcaaattatccttaattgcatctgtatgtatcctgtaattcaatttggaaatttctctgtttaaattccaattcagagataacctactattctcatctgtctttaatctcctgtaatccttcataatatacaactgaaactcaggagaaatccaagttgcaaaagacatagcaatatcgctatgggcatatgttccgccatagcgtcctgcctttgatgtaataccaattgcattcatctgtgtaatccacttagttggcgtcattacaaaccgatttaaccccgcctcatttttaaccgcctcgaattgcacacggttaaactctggattatgcaattcttcccatacactcaaaaactcaatcgtatttctatttcgcagccagttttgaattacaaatctagggtcatcttcattacgatattttgcaatgtctgttaatgagataaattcattttcaaaatttgttgtataaatgcctatatcaatgcctttagcatgaattgtatctttaattatctttcccattgtccctccaataatcatatcgcaaatttattgccatattgatcaatacttttctaaaagaaaactttctgggaaactttcttcctcccacattttccgatacgcttcaacataaaatttgatacaactcggatatgcatataaatatcttctgcacactcttttgtacaattccaatacctttgacaattcatcttctgacactattctactgcatacatcatccactaatggaagataaacttcacaagctttttgattcagccggactatctgctccgcaatctgtaatattctttcatccattaaattacctcaaaatatttaagagcatcctttatcgcctctaccttttctttaggcggatgtttcctcggctgcttcagttcctctgttacattaaacacatcatacgttgtcaaacctaataatctctttaccttcgccttctccgaattctaacttcacattaataacactatctgggtgatttgtgggacaaaagtacaaccgtctcaacgtgtgttgagtgtctgaaacagattcctacaaggcatagttgggtcttggtggaagctatttcctatcatcaatctatctgactgtcacgaataaactttaaaaatagcttgtgcatttcgtagtatcttgggatatgcataactaaaccaccttacaatattttatctttccaatcaataacatcttttagaacaagcttttcaatggctttcatatatgtttccataaaatgataatctggctcatcatttttagttggcaatgatatatacaatgcgtctgcatttttagcatagaaattccgagaataatcgaattgtcctgcatgagaagatttatgtaggcatgctgcaataaacatagctgcatatttgggcaatttctctgtgtggacaacagcaatatggtcatcagcaccataattgtaattacgatactttgcggatccaaacatatcaatagtagttgtattatttaaaaaaatttcaacacaatttcctatatatgcagatataccagcattggcttcgcctgctgttacaaaaggcaatttcccatctatcctatcaaagctttttagtcttttcccccgggttgattttccaaacaactgttcaacattgtatgtctgccaatttaattgatttttattgaacttaccaatagcactttgctcttctttagttaaatcagaattgcttagtccattagccttaagataaccagttaaatcgcctaagccatcttgctctaaagaaataatataatcttccatgtaattataatcaattttacattttttagttacaggtaaaactattttcgtattttttaaagctattttcgtggcttttgcattatacgtaaatctattttctattgcttttcgtatcgaagtcataatatacaatgcagatttagcacttaaaaaatcagattgcaatacgctggtcgcaccatgtccatcttttaaatagaatggtgtgtcaacatagacaatattttggttattagaatggataagaatagttggtaaagatttcttgttatttaaaacacttgaatttaagtgataatatccaattattccattatttgtggttgactgtccataaaatggatatttaggctcattatcaatagctaaatctttcagctttaaggggtcaatttcgatttgtgtttgccaatttaacacttggtctaatttaaactccttaaaatcaaccatttttttctcctttcagaaattttgcaatctcccaagatagataatccctaaccgtctttttaaagtcctcttcagtaggtattaaatctattttttgatgctgatcaaaattccaatcgttgccgtcttttgatataacatccataacaacttgttttttaatgtcccaaagttctgaagaaacattggctgtaataccattcttataaatttccacaatatctctgtatctttgtgatggactatccagttcataaataccacgctttgtacgtttatatccgtcatttctaaaatcgataaacttcacttgctttttatagtcatgttctttacctgtgtgttctagaatataaatactcgtttgcacccctgccataggaagaaataggtcaacaggcattttaatactagcaactaattgatttttagcaagtatttctttgcaactggtaatgcctctaccactgcccgcagaatcttgtataataataccagcttttccccctattttcatgttttcaagcccaaattttaaaaatggcaaaccattttccttaaatgtaaagggtggattaagtagtaatgtatcggcgttaaaatttttatacaactcaggtggctcatcaaaagacgaaccttttctaatgttactagagccatcacctcttaaaatcatattagtagaggctagtgtatacatctctgcattcaattcaatacctagcaaatgttgttgttttatttcatcaattttcttatttgcttttgttgtgttcttaccatatttttcttccacacattcaatcataagtttcattgcagaaattaaaaaaccagcagatcccgttgccaagtccataacttttgaattttcatcaatatccaatatttgggacatcatttttgtgacataaggcggggtcaaaacaattcccaattcttttccatctccaaaagcatattttaaaaattcggaatacatttctcccattatatccaaatgaccactcattgagtcaatagataaaaagatgttctcaaagatatatgtaaatatttgctttgtgacacttgcctctttttcaagcatctctgcaacgatatcatcaagagcagtgattttatcacggtcatgatctttgttaatctcggtaaaagacttcatcatcaatgcaactttgtcagctggtattttctttacagtaagataattatttatgtgcttaacgattaagtctccatcacgctcatcgtctaaatctaaacccttcaaatcatttggaattagaccctttttcttatctgcaatatcctgcatagataacagcatacccgaaacataaagaaccctttgtggtgcagtaatagcatgattatgcataagtttatttaacttttttgcatattcttgaagttttgattgagaatcaattaaaactctatgtttttcttcctctgttagtgtcgcagctttgtaaaactccgcaaatgacaatttattctctaaaaaatccaaggtagtataactacttacaagtttgtaagattcatcagtagccccgaaaacataatatacttcaatagaaacattttcctcactgtctcctgctataccgattgcaaccacttcactatatcttttactcattattgcgcactgtgcataatgtattgcaccatttacagcaaagttttgtactgattttatgtcacgtttaactttaccctcttttatagcagctaattttgctgcgcctaatttgttttcaataataacaggaatgttaaatgactctagctcaaaatcaggtttccaagatttacccttttctttttctccttcaatttcaagttccaatcttttaagcttaacgcccatttgcaatgccgattttaagtgaaaggacattgcagattcaactgtataatttttttgtcctattcttgcaaactctaatttcacccaatcatttacattatcctctaatttccagcttgtcataattacttttatcctccacgtctccgccaaagttcacccaagcgtctattttttgatttttttaacttctatcttttcactacgtgaacgcaaggaatattatctacatttatctatttgcgcattatttccattataacacaaaagtacacgactatttcatttgtgaacactcaaagggtatttacatttatttctgccaaaacaactcttccgtattttctgagtataattatatcaaataattttttgcaacatttacatctgtttttactatttttccatccggtgcgttcttccatgtctgcaatcccatgtactcttttttatggtctgctctttctacaataacttccgctgctgtatgaccatgaattgcaaagtgaagtttattctgtactgtggcaaaaaaatctttcgtagttttggcatccttggaataatctactgaagtctcataaatattagtaatcttttgataaaattgccgctcacttgcacgaatttcccgtatttcatctaataaatgttcaaaatactcttcatcaaaaatctgtccgttttccaaacgcttcttatccaaaacatatccttgaatcgtgtaagttcgtattacttttgtagcccactggcgaaactgtgtagctctcagagaattaacacggtatccaacagatataatagcatctaaattataaaactttgtattgtaatttttccctccgaaccagtatgtcggaatttccgacatactgaactttcttccaattctccttcttcaaaaatatgttttaaatgttctgtgattgtggttctacccttatcaaagagctgtgagagcccttcttgcgtaagccatactgattcatcttgtatccggacttctattccatcttcttaattttgttttgtataaacaaggaagtctacagtgctattgcgaatttgaattttctttctatcttcgttcatttttctgacctccttattcaattaagccaaaatgttttaacgcatcttctatcgcctttaccttctcttccggacaccccggatactccctctttggcgcatctgccttattcggtgcttcatgcataggcaaaccatgtttacgcttcacttccgcaatatacttcggatgcacattcagtccatacttttccctcacatactccttaatcttctaataagtagctttttcagtcacatcttccctatctacagtcatttcaatatcaattctctccacatcctttttacgggttaagagcgcaaccgtctcaacatgcaccgtcccagggaacagatccacgcatcccatccgttccacctgataccccctcccctgcagcatctccagatctctcgcaagactggtaggcttacatgcgatatacaccatccgctccacaccaaagttcgttatcttctccagcgccttcgggtgcacgccgtctcttggcgggtcaatgacgatcaggtccggcacttccccgagctcatctatgaccttcagcacatctccggcccagaacgtacaattgtcaagcccattgagcttcgcattctcctttgccgccgctacagcctcctccacgatctccacaccgaccacccgcttggccaccggcgccagtatctgggcgatagtgccggtgccgctgtacagatcaaagatcaccttgtcctttgtgtcgccgatatacgttctggccatttcgtaaagcacttccgctccgagagagtttgtctgaaaaaaggaaaacggcgtgatcttgaatttcatcccgagcagttcttcgtaaaagcagtcctgcccgtaaattatatctgtcccctcgtccttcaccacatccgccacactgtcatttttcgtgtggaggatgccggctatctttccatcaagcggaaggtcaagcagctgtcctgcccaatactcctgcccgaatccactttcaaaatcatattctgttgtcgtcacgatatctataaggatttcccctgtcttcactgcctttctcacaaggagatgacggaaaaatcctgtatgtttcatacggtgataatagggaagccctgactttttggcgcagtcaagcgtacaggccagtatcttcctgtaatcttcatcaacgatcctgcagtccgccacatttacaatgtcgtggaagctgcctcttttatgcatgccgagagccagcgggccgtctttgtattcgtccccgaaggagaattccatcttattgcggtactcctgccgggccgggcttggtttgatgccctcccacacatagtccccgtccactgcctcatccatcatggacttgacctgggattctttcagcttcagctgctcctcatatggcaggttctggtacgtacagccgccgcactggccaaaatgcggacagtccggcgtcatctccagctcggacggccggagcacttccagaattttcccctctgcctttccctttcgtatcttgctgactgaaaactttaccttctgacccggaatcccgttttttactgtcactgtcttatcttcatcaggtaggaataccttccccttgttcgggaattcaactgacgtgatcactccttcgtatacctgcccttttttcatcttccttcttcctctctgtcttaacttaatctgcgtattttgctttcattatcgtcttgtcctgctgtacccggatactgcgcaggctctttatatactggctgaactgtgaatatccgtaatcgcttatcttgaagttcttatatttctcatatacacggtttccgaggatactcagttcgatcccgtcttttcccgcttctttcacaagctttaacacaaagcggtcgatgtcttccttcatgcctttgtcttccttgagtgtaacggacataaaattgcctttttttacaagctggatccttgtgaaatcctccaggaagcgggacagcatattgtagccgtagcttcgcacgtcaaagtccggatacagactgacgaggcggcttccgacttcaccgagccccgtctgcttattattgtcctgattctcaatgatcatcttgataatctcatcctcgatccgttccccgcgcaggccgccgtggagttcttctgtctcctccagttcctcttcctctcccggtaccggctcgttcagcaggttttccaatatggtgaacttgtcgcacgccttgcggaacggttccggtgtcttgttttcgcccatgccgatgaccagctttccgctctctctcaaccggctgacaagacgggtaaaatcactgtcgctggacacgatacagaaaccgtgcacgtcattcgtgtacagaatatccatggcatcgatgatcatggctgagtcggtcgcgttctttccctgtgtgtaactgaactgctggatcggcgtgatcgagttggtcagcagttcatccttccacttggaatgctgggtgcttgtccagtctccgtatatccttttgtatgttatgttcccgtacttggaaagctccgtcagtatcggttttatatattttgcagatatgttgtctgcgtctatgagcagcgcaaagaattgttcatccatcttctatttcctttctccggcaggtctgcttatttgaattgcctgcctccaaacataagagtttcctctatcacataaaaagcaggcaggataacctgatgtctccagcccgcttctctcttttcgtatcaatattgttcttctatacctgatcttcgtcattgaagaaattatcatcaaaatcatcctcaaaatcttcttcaaaatcctccagataatctggtgtaaagaaacaatatacagcatatgctattcccgcaacggcagctactgcacctacaatggcaagtacccagagaactgtcttacagtgcttgtcatcttccttcttattaaccagctcgctcaacttcgttgccgcaataaaatcctctaccttactcatgctcccacatcctttctcctgcttgtcaacgcaagttcgattattgactttattataacactatcaatttgagattactatatatttatgccaaaattgccaacttttatccatttatatcttttccagcctggcaaatgttgcaaacatttttttcgtgccgggtccgtcaaaatccaccgtcacttcatagtctcttccgccttctgttatggccgtaaccgttcctgccccgaacttgatatggcgcacccggtcgcctacaccgtagcccggtccgctcccgtcggagacggcaaactgcctgaccggcctggccgcgcctccaaacgcctttgtgcggaatgtctgtctcgcctgggcgtacgcgccctgccgcggcggttcttcttccttttcaaacactgcccctgttgcgagcagatccatcggtatctctttcaggaaccgggacatcttattgtactgtgtctccccgcggatcatccgtcttctggcgcaggtgagcgtcagctcttccttcgcccgcgtgatccccacataacagaggcgacgttcttcctccacttcctccgggtcgtccgccgttattgtcatatagctcgggaaaatgccgtcctcaagacccgccagatacacccgcggaaattccagtcccttggcgctgtgcagcgtcatgagcaccacatagtcactgctctcatcgagactgtcaatgtctgccacaagcgcaacttcctccaggaatccgctcaaagtcaccggttcgtttgactcctcgcacgcttcctcataagcggcgatcttgctcatgagctcgtcgatattttcgatacgtgtctccgcctctatgctgtcctctgcctgcaggctctcaatgtaccccgtctcatccatgatctcctgcatcaggtcggagatggacatctcccgggcatctgtcttaaaatgttcgatgagcgccacaaaggactccagccttgacgctcctcttccaatattcggtatcaggtccaccgcgcaaagcgcctcatagaaaccgatacctcggctggaagcatattcctgcacccggttgatgctcgtaagcccgatgccgcgcttcgggacattgacgatcctgcgcaccgccagatcatcctgtccgttatctactgtcttcagataagaaagcaagtccttgatctctcttctggcataaaagttgacgccgcccacgactttataggggatattggccgtcacaaacttttcttcaaacatacgcgactgggcatttgtccggtacaggatggcattgtcgttatatgtacagcctccgctatctacctgttcccggatatctccgacgatatactctgcctcatcgtaagcggagtcgaactgccggaagtggatcttgtctccctccccgttgtccgtccagagcgtcttgtccttcctgccgtaattgttgcggatgaccgcgttcgccgcattgaggatattgctcgttgagcggtagttctgctccagcttgatcactttcgcgtcttcgtacacctgctcaaagttcagtatattcttgatattcgcgccgcggaacttatagatagactggtcgtcatcacccacgacacacaggttcctgtatttggaagccaggatccgtatgagctcgaactgcaccgtgttcgtatcctgatactcatccaccatgatgtaccggaaccgttcctggtagtagtccagaatatccgcctgtgtctggaacaactgtaccgtcttcacgagcagatcgtcaaagtccagcgcgttgttggcgcgcagctgcttctcatactcttcatagacctgtgcgatcttctgcttgttgtaatctccctccgcgcgtatgcggtattcctccggagtgataagctcatcctttgcagaggagaccgcgcccagcagcgtgcgctctttatatatcttcgtgtcgatctggagcagcctgcacacatccttcatcagcgtcttctgatcgtcactgtcatagatggtaaagttcgtgtcatagcccagcttgtcgatatggcggcgcaggatcctcacacatgtgctgtggaatgtgctgacccatatactctctgaaccgaagccgacgatattgtccacacgttcccgcatctctcccgcggccttgttcgtaaatgtgatcgccagaatgttccatggattgactcctttttcttctatcagataagcaattctgtgggtcaggacccgtgtcttaccggaaccggcccctgccagtataagaagcggcccttctgtatgatataccgcttcctgctgctgttcatttaatgtctcgtagatgctcaatctttcttattcctttccatttctttcatatattcatgttctttctggatctcatcatgcagcgcaatagacgtccactcccggttagagggagttagcatcgccttcagtcctattttgatcccttccttgcgcatgagaaacaaagccttgtccatcatatcttccgaggcggcgttgatgacaagcatctcgtcagaaaacccgtcctctgcacagaccgaagcggcatcctccgctttgtccgtccccgccagcgctccgaccggcagcatatattcttctttttccacatgccggaccttatagccaagaaagccaaatatcatggcgatctgttttcccttttttgtacctttcagattatagcataatacacttgatctcatcgtatagattcccttcacaaaagtctgtttccattataagttctttgcccgcgaagtgcaaggaagacattcagaaaatattaatagtttcttactgttttcattcgtcatattgcgacaaattatgctatagtaggattacaggatattataataacttaatgaggggatatagatggaacaacagacaaacaacacacattctcacacgcacagcggacatatttccagacgccgcaggaagctgaaactgtaccggaatctcaagatagcagccggctgcgccgccgctgtcctgctcgtgtcagcggcatttttaaccgtccgcgcatacacccagcctatagacatcacgttaaaactgaacaaagccgagatcacacagggagaggaactgcccacgcttaaggcaactgcggtatacaatggcaaaaatccggataagatgctggataaaaaaagaaagctcactgtaaaagattttatcaatgagcttaattccggcaaatactataccttctcctgcaatgcggacccggccgtcgacaatacatatccggtcaagatcgtcctgaatgaagattttaaaaaacagctgaaagaaaaatgggcctcccggcttaagcttgacatacaggacggagagcttatcgtaaaaaataaactcggagcatgggacggcaggaagttcaagctgaacagcggagcatatatggcaggtgattttctcacctccaggggaaatacatattactttgatgagaacggcgacatggtgaccggacagcgccagatcggactgaagctctgtacttttgacaaggacggaaaactcacggccaaaagcgatgccgccgtgcagccggacaggcccatgatcgccctcaccttcgacgacggccccggagagcgtacgcaggaactgctcggagtgctggaacgttataacgcacacgccacattttttatgcagggaatgaatgtgccgaaataccctgacgccataaagaaaatgctggagacaggctgtgagctcggcaatcactcgtacaaccacccggacctcacaaagctgaaaccggaaaagattaagaaacagatcggggatacgaacgcggccattcagaacatatgcggccagcccgctgatgtcctccggcctccttacggcgccatcaacgacaaggtgagagccagcgccggaatgcccatgatcctctggtccgtagacaccctcgactggaagacaaaagatacacaggcaacgatagagtctatccgcgcttccgcaggtgacggcgccgtcattctcctgcacgacatccattccttcagcgtggacgccgccctggccgtcataccagagcttacgagacagggctaccagctcgtgacgataagcgagatggcggccgcaaaaggcgtatcactcgagaatggaaagacatacggaagtttttagagatttttcttttttcctttcttctgtcttcatctcccggaacacgtgatatatacagaagaccgccgctgcaaaggacacgatatcagccgccggggcagaatacagcgccccggtcactccaaatattcccggcagtataagggcaagcggcacgctcagcacaaaatctctcagcagcgacaatgacatggacaacaccggtttgccgagcgactgcaggaagatactggctgacttctgcaggcagcacagaatgatcatcccgagaaacacccggaaggacagcactgcaaattcattatataacccgttctcactcccgaataatccaatgatcttaagcggaaagcactcgaaaccgatacaggacacgatacccaccgccagttctgccagcatcatctttttgaatatctcctttactctcccgtaaagccctgccccgtagttatatcctacgatcggctgggcccctgcggcgattcctaccacaacagagatgacgatctggaacactttcatcacgatccccacaaccgtcagcggaatatccgcgccatatttagaccttgccccatagaagacaagcacattattcatcacgatcatgatggccacgatggacacctgcgtcaggaagctgctgataccaagaggcagtgtttttttcagcagtccggcagacagacagaagctggacttttgaagccggaaagactttgtatgaaataaatagtatactgccagcagggccgacactgcctgccctgcgacggtcgccacagcagctcccatcattccccagtgcaggacgaatattgccaccggatccagcaccacattgatcatacaccctgcaagtgttgacagcatggcaaactggggacttccgtccgcgcgtatgatcgaattcatcgcattggcaaacataaagaaagggatacctattataatatactgaaaatattcctccgcgtacgcgatattgttctctgttgccccgaatccggccagcattggttccttcacaagaaggaagatcattgtcagcagcagtccgcccgccgtgatcatcacgaccgcgctgcctacgcttttgtgggcgccttctgcattcttcattccctggcagatgctcaggcaggcggcgcagccatctcccacgagcagcgccagtgccagcgcgatcacagtgatcgggaatacgacatttgtcgccccgttcccgagatacccgacaccccttcctataaatatctggtccacaatattataaagcgctgacacaagcagcgacataatgcacggaactgaaaacttcagcattaatctgcctaccggttcctgtacaagatactcgtttacattctgactcatttattctgttctcctctcttttctcatcttccggcagaaaaaaagcagcgaagacatgattcataactttcgttacaattacgatcacataatcttcactaccatttctatctcatgcaatattcttttttccgcccgaacaagtatattttatcagatgtaggaacacccatgtaaggagaaattttatttttgtcacatttcccgaaagaggctttatttctctgccgaattcccgtcattttgctcccagagccagtgcaccgcctccatgtatgccccgcggtctttcagatagctttcgcagtgctctgcgccgtccacgagcaggaggcgcttcctgctcccgcacgcctcataattgtgcagcgtcatctcacatggcacaaaggtgtccgcctttccgtgtatgaacagcaccggcacagtacagttcttcagcgcctccggcgcggaatagtcgtcgaatccgaaacctgcttttcttctgcaccgccgtgtcagccgcttcactgtacgtgtgcctacgaggcggaaatgtttctggccaaagttcagcaccatatcgccgggacgggaaaagccgcagtctgctataatgccctttacacattccgggagcctttcccctgccgccatgagcaccgtggcggctcccatagatacgccgtagaggtacacgggcacattctctttgttgtgctcctctacccagtcaagccacgtgtggcagtcgtgccgctccagtatgccgaagcccatataagtaccctcgctttctccctgggcacgctgctccggcagaagaagactgctgccttcttcgtacagttcccttgcgcacgccccaaagtcatgcttccacgtaccgcgccacccgtggaacatgactacgatccgcccggcattccgggcttctatataatgccctttcagcttcagcccgtcaaagcttttcactgtgacagtctcgctcctctgcttatcaagccagtccatcccccggcggatctcctcccggcatgtcttcttcctgtcatcctggcttttgaagaagcggcatctgcgctccaccgccatattcagaaagatccgcagcgcggcaaagtccgcagccgcggccgcggctatggctgccgccgccttcacagatgtcttaagtctcttctgcatcatttccctcctctgagcgtgcatatatcctggcaaactcccgcacatgccgttccagctccagaaacgcttccgcctcccgctccggctcctggtcgtatttgttcagcaggaaaaacaccggggcataaaaattcatggccatggcagccggatctgcctccttcagcacgccccagcgtgtcatttcccagaacagggccgtctggtacgcgatactgtcttccatgaacaatttccggtacacgccgtatatctccttcgtccggtactgctctatcgtcagcatacgccggaaacgggccgcaaactcatctttcaggtagaacaggaatatctgcctgctcagctgaatgaggccctccgtcgtcagatctccgtatatccttgccgcccgctccatatccgcctcatcgggaaggccgagcgtctgtgacatgcgctccattctggaagacatctcctgcacgatcgtgtcaaagatttcctttttactcttatagtgtttgtacaatgaactgtcttttattcctacagcttccgcaatattctttacgctcgtcccctcatatccctttgtggaaaataaggtaagcgcctcttctatgatccgctcttttgtcctcatagcttcctcctcacaggcactcttttacggcctgctcctgttcaaacaatacgcaccctccggtgtgctccgcggtcagcagtccctctgtcctcagccgcacaaaaaacggggaacgcagcgcctcacgcagacttgtatgtaaaaggtccgtgtccgagaacggggaaaaaggacacggttccgccccgccttctgcgttgatgtggaaaaatcctcttcccgccgccagacagccgccggaactcttctcatccccgggaaaggacagaaacagctgctcccggcagctttcccgcaatataccgatcctctgctccatatacgcccgctccgcttcccccggcgccagatatcccgtccccttgtccgccggcacgtattcgacgtagatgaccgccctgcacccctgccgggccaaatgcgccgtgaagtcctcagacagcacttcccgcatattttccttcgtgacagtcacagaagcgccgaacagaatcccgctctccgccatccgtcccatagcggcccggacggcggcatagacaccgtctcctctcctttgatccgtcagcttttccgccccctctatactgagtatcggtatgagattgcggttttcatcgaacagctttatatacgcgttctcgagcatcgtcccgttcgtgaatacgggaaacagtatcctgcggtgtctccccgcctcggccagtacatcccggcgcagaaggggctcgccccccgcaagcagaataaacgcaacgcccagctccccggcctgacagaagatctctccccactgcgcagctgtcagctgcgcctggccgcctccatccgtgcagcttgcatttgcccgggcatagcatccctggcagtgcaggttgcaggcgctcgtaatgctggcaataagaaagggtggaatgtgctctccttccctctcaagctttgtgcgtctcctccctgcctcgcgcaccgagaccgcataccgggccataaacagactttccttcggattctccgcagacgcccttagaatcccccgcacgatccgctccacacctttacccaaatacgcttccaactcattttcccgcatatgccgtcctccttcgtccaaacaggctaataaacactagcttttcctgtctccattgtagctagtattcattagcctgtcaatacttttctcattcatcccccttccagacgatcttccatttacattctgtctggtggaacagcagcgtgaaaaaatactccttcccttccgatacggtcctgcaggcgtacgataccatcgggataccgcagaagttctccttttccgaatacagcacttctatgttggatatggaatggatcactccgtccctgtcctggtatttgataaacttcggaaacatatttcctctgctcgtaaaccagcacccgcaggcgacgtcttcctgcctcccccgcacaggcccccggtccggggattccgtatttataccgattccaaaagccatcgttgtccctcctactctatcttaagcttctcataatccaccgtccgtttttctcttgacacccctccggacagatgatctatctccggcacagccagaaacgccgcgcgttttaccgcatcgatcccgaatcttccccgcacccggtcaatggtcctgtcccatgtctccagcttcctgtagtctgtatggtcaaataaagacagttgcctcagttcgccctcctccttcactctggcagtgtgtatgccgagatgccggatgggcgcatggtcccacagttcgtcaaaaagacggcaggaagcctcatatatctcctttgtgatattcgtcggatccggcagtacggtctgatgagacatctgccggaactcccggtcttttatcccgatgcttatgacctgaatctttacactgtcttttctgagccgcatcccgatcgtctccgccagcgcaagaagcacaagcttggccgccgctgcgtctgtcacatcaaagggcgtcgtcgtactgttcccgtaacctttattcggtacgggcgccgcctccacaatagaaaagtcccttccgttggcaaagttccatatcacttccccgtgagatttcagatgcattctgagcagttccggatccgcccctgccagctgtccgatcgtatatataccgagcttatacagcttctttgcggtggcgcgcccgacgaaaaacaggtcattcaccggcagcctccacatcttcgtttttatttcttccggaaatagtgtgtggacccggtcaggcttcttaaagtcagaggccatcttggccagaagcttgttggatgagacgccgatatttacagtaaatcccagttccctgcggatacgctccttaatatcaaaagctgtctttaccgggtctccaaacagcctctgcataccggacatatccatgaatacctcgtcgatgctgtactgctccaccacaggcgtatactcttttaaaatgttggtaaatgcccgggaacagttctcatacagcccgtaattgggcggggcaatatacaggccggggcatttctgcctcgcctccggtatagattctcctgttttaattccatatgccttcgcgggaatggatttagccaggatgatcccgtgcctctgctttacgtctccgccgatggcggacggtatgtctctcaagtctacggacgccccgagaaatccaagacgaaaaaccgcctcccacgaaaggaaggcggagtttacatctatatgataaataatctgttctgacataactcacacctctttctttttactgtaagtatatcagaacttacgttcggtttctctgggaattttttcctccgtatcctctggctcctaaagcggaaggctctcctgcataaaaccttctttttccagccggatatccggcttaagaccgagcagctgcccgtacatcttttcatcttccagccaggccctgctcctctcttcatccagaatgagcggcatccggtcgtgcacggagcggacagatgcattggcgtttgtcgtgaggatgataaagcggtttccctctgaaaaatatttccagaaaccggccagaaacatgccctgtcttccttccggcttaaaggtgatcttgttcttatccctgtcccattcatagaaccatcccgcgggaatgagacacctgcggttcatgacactctcggaaaacatccttttctgcagggcgctttcacttctggcgttgatgacaagccccttgttctgcggggccggatatccccactccatctggcgcagcacggcctcccccttctttcgggcaatgaccgaagccttctgccccgggtatatctctcctttaatgagcagcttcctatccagctgcctgacgatcttttctatctctctggctgtctcgtcgtctacataataacgtccgcacataccttcacagctcctttacgtttattgttaattaaatcatagcacagactgtcaaggggagagaggagaaaatacttgccatatagtttttaatactatataatagctatattggggtgataataatatgacgattgatacaaaagatatgctgaacagtatattatcgagcatctcacggatcgattacgtgcggcccgacagcattccgaatatagaattatatatggaccaggtaactacattcatggaaaaggaactgagcaccacgaagcgttttccggaagacaagatcctgacaaagaccatgatcaacaactatgcaaagaacaatcttctcccgcctccggtgaaaaagaagtattcaagggagcatattcttgttcttatctttatctactactttaaaaatatcctgtccatcaaagatatagagacgctcctggcgccgatcacggaaaagtattttgacaatgacagcagtttcgacctcacttctatctatgaagagatatgccagactgaaaaggagcgcatcgattcccttcagaaagaggttgccagagcgcaccggactgcagcggagagcttttcccaggcaccggaggacgaaagagattacctgcagcttttctcgttcatatgcagcctgagctttgatgtctatgtgaaaaagctgcttatagaaaaactgatagatgaactgccggcgccggacacggagaataaaaagaaatagagcagaccgctctatttctttttatttatcttctttaattctctcaaacaccatatcgtaaccgtcatttccgtagttcagggaacggttcacacggctgatcgtagcggtagacgcccccgtcttctcggcgatctccagatatgtcttatgttccctcagcatctttgccacctcaaagcgctgtgacagtgacaacagctcattgatggtacagatatcctcgaaaaaagtatagcactcttctttatcatccagacttaaaatagcactaaacagataatccactgcttcagtcctgatttttttactcatactattatctccttcgtaacagaattcattactgttacattttagcacactaaattcgtaaagtctacagttttttatttcgttttagacatgccttcaatttttccagcgatgtgttggccacaagttcctccggaaatccggtctcatccaccacttccatcgaatatctgcagttggcgatatcaacgtccatatgggcatccgagccaagtaccaccatcgtttcatatttcttacacaatctgagcatgcaggcggcattatggcgcgtatcctggcggaatcctcccggcctcagggaagagttgttcacctccagcagcgtgccggtccgctttgcctcctttacaaggacttcatagtccacagggacccttccgtcgtcaggatgccctatgatgtcaatatgatccttctccatcacgttgatatacgtctgtgtgatctccgccctgccaagcacatctttataacagggcacgtggatacttgctatggctatgtccaattcacggataagagattccggcaggtcaacgctgccattttcatccatgacgttcagctccactcccatgagaagctctatcccgtacatatttctcggaatgactctcatattctgaaaataaaagctgtggcacgttcccggcatctccggcgcgtgctctgtcaccgccagtccggaaagtcccttgtcagcggccatccgggccatctcgcgcagcgtgttgtaggcatgtccgctcgcaagtgtatgtgtatgtgtgtcaaccgcgatatttatattctgttctgccatctgaaaaactcctgttcgtttaagatacctccatactaccataattttcatattgtttctaccgcaaataaaggagccggaagaatgttcccggcatctctgtttaaattgacgccatggaaataatatacagtatgtgcatttctctttttacatattctaagcataacaattccataaatattgtaaaacaggaggtatccttaagcatgaaagataaaaaagatttagaaaatgaacgtctgatcgactcctatgactacctgtccaacgccgcatcatcctgggactgtacgggactcatcccgtccgagcccatttccacaggcgaactcgagtcgtatgaagacctgtaccacttccttcctccgaacgggaaggcatccaacctgaagccggaggagaaagacgaacaaacaaaataactcagcatatattaatcaaaaatggagtgtttgattatggctgatatgaaccttgtccctgtaacggggattgtacagaatatcacatctatgcgcgacaactgctgtgaactgcttgtttccatccgcaattctgacggcatcaccaactttgtagtaggtcctgactcctacgtcatcaatgaagtgcgcctgcggccgggaatgagcgtgattgcattttatgatgcaaatctggctataccgctcattttcccgccccagtaccgggctgtcatcatcggacgaaaaaatccaaacgaaaatatgtacgcgggctacttcgacgaaaacctgacttccgaggacggctcccttcagctgaacatgacggggacgaccgatgtcgtcacctccaacggacagcgttttaactgtgacctggggggccggcttctggtcgtatactacagcgcctcaacgagaagcatccctgcccagacgacgccgcggcgcgttatcgtgctctgctgagcttttgttcttgacacattttccaaacgaatgtaaggtagaattggattatgtattgagaggttgaataataatgaaaaagatacttatgatagcaactggaggcaccatcgcttccaaagaaggagctgacggccttaccccggctatgaccggggaagagctggcttcttttgttcccgggatcgaggataaatgtgagcttgatatccttcagctcatgaacattgacagcacaaatatgcggccccgccagtgggtggagatccgcgatgccatcatggaacgctacggcagctatgacggctttgtgatcctgcacggaaccgacacaatggcgtatactgccgccgccctttcctatctcatccagaacacaccgaagcctgtcgtcatcaccggctcacagaaacctatgggcaatccgtataccgacgccaagctgaacgtctatcagagtgttctctatgcgctggatgacagttcctgcaacgtctctatcgtatttaacggcaaagccgtggcggggacaagaggacgcaagcagagaacaaggagctttgatgcctttgagagtatgaattttccgcttctggcagtcatacacgacgaccggatcgtccggcagtatagcggccctcttccgtcagaggaggagctcgttacgtacacacatctgaatgaccgtgtattcgttctgaaactgactccggaagtgaaggcagacatctttgaactgctgaacagccggtacgacgccattatcctggagaccttcggtatcggcggcatccctgaatatgacgattcctttgaaaaggcgatcttcggatgggtcgattccggaaagacgctggccgtcacgactcaggtgccggaagaaggctgcgacctggatgtatacaaggtgggcaagaaatacagcgaacaccccggcattctccaggcaggtgatatgacgacggaggccatcgtggcaaagatgatgtggatcctcggacagaccggtgaccgggatgaaatacgcgcattgttcttcaaagagatcaatcatgaccggaccgtataaatacacattttgttccagagacatcccccggctgcagagcagccgggggatgtcttttttatatgaatcttaataatatcttgcgtgaatctccataaagtctcaattttcgcctgataaaataaagatgaaaggagttcaaatgttatggccgaaaaaatactgatcgtagatgatgaacaggagatcgcagacctcgtagcactttaccttcaaaatgagaactttacggtattcaagcactataatgctctggacgctctggactgtatccgcagtgaaacaccggatcttgcaatattggatgttatgatgccagatatggatggactggaactgtgccggaacatccgtgaacagtaccgctatcctgttatcatgctgaccgcaaaggacggggaaatcgataaaatcacagggctgacgctgggcgcggacgactatatcacaaagccgttcctgccgctggagctggtggcgagagtcaaagcccagctgcgcagatataaacggtacaacacgggcgccgggccggatgaggatgtcatcgttcattccggacttgtcatcaatgtcaggacacatgaatgtaccctgaatgagaagcctctctccctgactcccactgaattttctattctgcatatcctgtgccggaaaaaaggagaagttgtcagctcagaagagttatttcacgaaatatggaatgacgaatatttcaccaagagcaacaacaccattaccgtccatatacggcacctgcgggaaaagatgggagattcctttgaggacccaaagtatataaagacagtctgggggtgcggatataaaattgaaaactgacacatccaaatccgttaagatcctcgctgcagttctcctgataccagttctgtgcatcgcgctctactatctcgtagacagcgtatggaacggcgctttcgtggactggtttgaaaagaactacatgtccacccgcgacgaatatcttccggataccgggcactatgcagtcgtccgcagtccggcgtggtctgagttaaaaccccttctgcttatccttctcatctgcgccgcattcctctggcttgtcagtatcctcgcatccgcccatttttatgcgaggacaaaggtcagaagatccataacgaaaacgggccgtatgctgcgcgcctatatgcttcaggataaggacacaacagaaatatttccgaaagattacgcggaactctctgtgcagatggcagaaatcaaagccaccatgcaccgtcacgaacagctgctcaaggaagaagccgcccgcaaaaatgatctgatcacgtatctggcccatgatctgaaaacacccctcacttccgtcatcggatacttgagcctgcttgacgaagccccggatatgccggatggacagaaagaaaaatatgtgaggatcacattggacaaggcccggcgcctggagaagctcaccaacgaattctttgagataacccgctataacctgcagcagatctcactggaaaaagaaacgatagacctctcctacatgctcgtccaaatgacggatgagttctatcctcttctcacttcccgcggcaacacagcccagctcacagtccgcgaaaacatgactgtttacggggacgccgtaaagctggcacgggtattcaataacatactgaaaaatgccatcgcctacagttatccgaacacacctgtggaaatatgggccgagaacagagaggacgacatattgatatatttccgcaataaaggaaagacgataccggcccagaagctggcgtctatctttgaaaagtttttccggctggatgaagcccgcacaacaaacgcaggcggcgcaggactggggcttgccatcgcaaaggagatcgtcaccttgcacggcgggaatatcaccgtaaaaagtgaaaatgaactgacgaccttctgtctcgtcctcccctcctgccattagcgggacctcaccccttcttaaccatttcttaggaaataaacagcggaatcttaaagtaccggcattctctgtccggtaaaataaatatgaaacaaagatcatacaggaaaaggcaggtatatgcgatgaataacagacgatataaaaaaccgctcccgggcagaaaatacaaaagacggcgcagaaaaagaatacgcctctttctttccgcgacagctgtcacgctcatccttttatgcgtatttctgtctgcaaaaatattatcccccctgatgctggaaaaagggaatgccgcagaaagtccgtacggctcctctgcctccccgctgactgttgacctgaagaatctgtacagcccctctgctgtgctcgtcgatctggacaccgggaaaaccattgccggaaacaacagtgatgacacgatatacccggcttcactcaccaagatcatgactgccatattggcagtagaaaagacagaaaatctggacgagattattacacttccttatgatttttttcagaacctgtatgcagaagaggcttccatggccggttttgagcccggcgaagctgtctgtctcagagaccttctgtacggtatactgcttccctccggagcagaatgctgccttgcatttgccgataaaatcgccggttccgaggaagactttgtaaaattgatgaacaagaaggcggaagcgctgggcatggagcacacacagttttgcaattcaacaggcctgcacgacgacgaacattattcaactgtggaagacctggcccttctcctaaaatatgcccttggaaatgatgatttccgggaagcatttacagccagccggcacagcacacgcccgtctgcccagcatcccggcggctttaccttttacagtacgatgtttgaaaatatgtcttccgcgaaagtcaccggcggggagattctcggaggaaaaacaggatatacgaaggaagccggtctgtgtctggcaagtctggcagacgtcaacggaaaagagtacatcctcgtgaccgccaaagccgacggaaaccacgacacagagcagtttcacatcctggatgctgtaaacgtatataaccagattggagcctccgcgcaaaattcccagtaacgaatccgcgttttcagaatatattataccattagcaatcaaggaggtattttatgaaaaagcgattacttgcagttctgcttgtggctgtcatgggtatgaccatgctggccgcatgctcctcttccaaagaggagaaggatacgaaagacgcggctgagactgccggggagacgaaagaacagaaaacagtggatgtaacacttaacgaagtggcacattccattttttatgctccaatgtatattgccattgaagaaggatatttcaaagacgagggaatcaacctggatctcgtgaccggatttggcgcggacaaaacgatgactgccgtactttccggtgaagccgatatcggcttcatgggctctgaggcttccatctatacgtacaacgaaggggccaacgactatgtcgtaaacttcgcccagctcacccagcgtgccggcaacttccttgtcgcacgggaagagatgcctgactttaagtgggaggacttaaaaggcaagctcgttctcggcggacgtaaaggcggaatgccggagatggtatttgagtatatcctgcgtcagaacaacctcgacccggccaaggatgtggagatcgaccagagcattgactttggttccaccgcggcagcattctcgggcggccagggcgacttcaccgttgaatttgaaccaggagcgacaagtcttgagaaagagaacgaagggtatgtcgtagcttccctcggaaccgacagcggctatgttccgtacaccgctttctccgcaaagaagagctacatcgacaaaaatccggaaatcatccagggcttcacgaatgcactgcagaaaggtatggactacgtacagtcccacacccctgaagaaattgcttccatcatcgcccctcagtttaaagagacagacctggacactatcactactatcgtgacaagatactatgaccaggacacatggaaagacaatctcgtatttgaaaagaaaagctttgagcttcttcaggatatactggaagacgccaatgagcttgataagcgggcgccatatgacgacctcgtaacgaccgactttgccgacaaggctgcaaaataagataatatgtaaaggctgccgaaggaataagacttttgttctcagacttattccccggcagccttctattcttaaccacctgagcattaaaataaacatctgcctcctgacggctgtttcgatccagttcttccgtacggaagaaggctgctggagctcagagacaaaggctgtcggcagatggtttcaattccttccatgtggagggaaactcatcggtcttggagcaagactgcaggtgttccaatttcaatccgctccttccatgcggaaagagacaaggccggactggatacgctccttgaagattgcgagatttcaatccactcctcccatgcggaaggagactgctacacatcgaataccgtctaattttacttcatatttcaatccaatccctccatgcggaaggagacccgcctgagccattgatgtcatgtaattctgatacatttcaatccactccctccatgcggaaggagacatagaaccttgcccactttgcggcagaagcatctatatttcaatccactccctccatgcggaaggagacgcggccagtttattaaagactatagaaactaaggcatttcaatccactccctccatgcggaaggagacggatgccgctaccagaaagccaaggacagtgatatttcaatccactccttccatgcggaaggagacagcaattctatacatattataacttaaaaccccaattacatctatacagactgcacaatttcacaaattaataacagcacaattcacatctttcaggcctcgctgctgacaaaacagcctgttctctggtgtggatcccccggcaattatatgttcacttcacattcgcactaaagtaaaagagacttacacaacacttaacccttccccctgttcagcagacccatacccgttaatcagaagagtcttcccccatccgcagctcttccacatagtccgccagttcgtccggcagattatcaaaaaggtagcttcgggtacttctgctctccttaagatgctcgcttctcagctcctgcatcaccagttctacctcttcccgaagtccttccgcagacagccttcttccgccctgcccaaggataatcacctgctccagtgcatctgacgtggcaacggtcacattatgtttccgcccgatctcgtggacagtcttctctatatactggtccgctgtctccgcttctttcgtatacacgacgtagatattatgatacgtagagacagaccccggatttccctccaccttgtatgcatcgaatacgagtatgagcgtcattctgcgaaatccctggtaattactcataatatccataagcttgtctctggcgctcatgatattcacctttgccagctctttcagttcatcccaggcaaagataatattatagccgtccacgagcagatattcctccgcctgttcccgttttttcttcggcggcctgtactccgcggcggaaatgttcctgctttctgtcctgcgtctttctgacggtctttttcttttgacggggccataggtgcggacaaatatttcttccagttctttttcactgcaggcaggcgcgcccgaaagttccgcaggacgcttttccgggctgccccccggcctgactgtctcatcttccaaagaacctccctgccatccgctgtccacatgcatatattcctccaccttgtcccagctgacgatgaatcctgcaccgtgcgcacagaacactgacccggtaggattttctatgtctttttcggagtcataaccgatcgctgttatgatttcctccgcgttttgacatggacggtatcctccctgcatgcaggatagtctgccccggcctctcgtataggcgttcacttctgtctgataatcccgcatggacgccaccggcgcactcccttcaaggacagacatatcccctgacagctttggaggttcaaagcttccgttcatccgctgaagatcagacatagcgcgtcccactgactcagcgggcacttccaggcggaatgtataataaggctccagcagaatactctccgcctttttcagcccctggcggaccgcccggtatgttgcctgccggaagtctcccccctcggtatgcttcaagtgtcccctcccggcaataagagttatcttcatatctgtgatggcagaaccggtcagcaccccgggatgttccctttcctccagatgggtcagtatgagccgctgccagttcccgtccagctcatcctcgcttaccgcactgtcaaagacaaggccactgccggattccagcggctccatcagtaaatgtacttccgcataatggcgcagcggttcaaagtgtccgacgccttccgctgctctgcggatcgtctctttatatacaatacttcccgcatcaaactgtacggccacaccgaaccgttcctcaatgatccgcctgataattccaatctgaacctctcccatgagattcacatggatctcaccgagacgttccttccataccgtgtgaagctccggcacctcttcctccagcagtctcagatccgcaagcatcgtatgtgcatctgtaccgtccggcagtacgagccggtaagtaagcaccggttccagtaccggcatgtcggacgcggactctgccccgagcccttgtcccggatatgttccggtaagaccggtgaccgcgcacaccatcccggcctccgcctcctgtacggtctcatatttggccccggaatagatgcgtatctgatccgccttctctctgaagggctcccggccgctctccctgtgtcctgcctcaacgacctccttgactctgaggccgcccccggtgatcttcatataagtgaggcggctcccctggctgtcccgggcgatcttatacacctttgccccgaatacttccgaatagaccggctgccgcgtatactgcacgattccccgcagtaattcctctacccccgccatcttcagcgcagagccgaaaaaacatggaaagaccttccgctcacggataagccgggcaatgtcttcctcgccggcctgttcctccgccagatactgttccagcagcgcttcatcgcacatggcgatctgctcataaaatatttccatgtctctttccggactgaaatccacacattccccgccgagtctgtcttggagttccttcagaagcctctctttctccgtcccgtcctgatccatcttattgataaacacaaaggtcgggatatggtaacgggcaagaagccgccagagtgtctccgtatgtccctgcaccccgtcggcaccactcacgacgaggaccgcataatccagcacctgaagcgtccgctccatctccgcagaaaagtccacatgccccggtgtgtccatcagtgtcacttccatatcgtccaaagggaacaccgcctgtttggaaaagatagtgatccctctttccttctccatctcataagtatcgagaaacgcgtctttgtggtccacacgccccatccttcggaccgcgccgcttaaataaagcatgctctccgacagtgtcgtcttaccggcatccacatgtgccagtattcctaatacaattcttttcatctatattcactctttcatgatgccaaatttaatgtctctaattattttaacgtctgaacatagatattacaacttttctttttccccgttctcctatataataacaactagagaatttattccatcgacttactgacaggaggaaaatatatgtcaaagagaacagatatccacaaagtactgataataggctccggccccatcatcataggccaggcctgcgaatttgattattcgggcacccaggcctgcaaggcactccgcggacttggatatgagatcgtgcttgtcaattccaatcccgccaccatcatgacagaccctgaaacggctgatgtcacttacatagagccgctcaatgtagaaaggctggaacagatcatcgccaaagagcggccggatgcacttcttcccaatctcggcggacagtccggcctcaacttatgttctgaacttgccaaggccggtgttctggaaaaatacaacgtacaggtcatcggtgtacaggtagacgctatcgagcgcggggaagacaggatcgaattcaaaaaagccatggacagcctcgggatcgaaatggcaaagagcgaagttgcctacagtgtagaagaagcgctggccattgcagatgaactcggctatccggtcgtgctccgtcctgcgtacacgatgggaggggcgggcggcggactcgtctataataaggacgagctgaaaacagtctgtgcccgaggacttcaggcaagtcttgtcggacaggtacttgtggaggaatccatcctcggctgggaagagttagagcttgagatcgtccgcgactctgaaaataacatgatcaccgtatgttttatagaaaatatcgaccctctcggcgtacataccggtgattcattctgctctgcgccgatgctcaccatctccgaagaatgtcagaaacgtctccaggaacaggcgtacaaaatcgtggaatctgttcaggtcatcggcggaacaaacgtacagtttgcacacgaccctgtcagcgaccgtatcatcgtgatcgagatcaatccgagaacctcccgttcttccgcccttgcgtccaaggccaccggctttccgatcgcacttgtatctgccatgctcgcggcgggacttacactgaaagacatcccctgtggaaaatacggcacattggacaaatatgttcccgacggtgattacattgtgatcaagttcgcgcgctgggcttttgagaaattcaagggtgtggaaaacaagcttggcacacagatgcgcgccgtaggtgaagtcatgagcatcggtaagacatacaaagaagcgttccagaaagcgatccgcagtctggagaccgggcgctacggtcttggatatgccgcagattttaatacgaaaagtaaagaacagctcctgcagatgctcatcaccccgtccagcgaacggcatttcataatgtatgaggcgctccgcaaaggggcttctgtcgcggagatccatgaaatcacgaaggtgaaaacttattttattgaacagatgaaagagcttgtagaagaggaagaaacgctggccgcgtcaaaaggctctcttccttctgatgaactgctcgtatccgccaaaaagaacggcttctcagacaaatatctgagccaggttctcgaagtgccggaagactccgtgcgcagccgcagggaagaactcggcgtacaggaagcctgggagggcgtgcatgtgagcggaacacctgacagtgcatactactactctacttacaatgccgaagataagaatccggtgcgcagcgacaggccgaagatcatgatcctcggcggcggcccgaaccggatcggccaggggattgaatttgactactgctgtgtacatgcttctctcgcactgaagaagctcggttttgagacgatcattgtaaactgtaatcctgagactgtatctacagactatgacacctcagacaaattatattttgaaccgctcacattggaagatgtactgagcatttacaaaaaagaaaaaccgctcggtgttatcgcgcagttcggcggacagacgccgctcaatctcgcctcggagcttgagaaaaacggagtacggattctcggcacctccccgtcggtcatcgacctggcggaagaccgtgaccttttccgtgaaatgatggaaaagctggacattccgatgcccgagtccggcatggcgaccactgtggacgaagcgcttgcgatcgcggaaagaatcggctatccggtcatggtccgtccatcttatgtactcggcggacgcggcatggaggtcgtgtacgatgatgagagcatggtgagctatatgaatgctgctgtcggcgtgacccccgaccgtccgatactcatcgaccggttcctgaaccacgccacggaatgtgaggctgacgccatcagcgacggaacacacgcgtttgttcccgcggtcatggagcacattgagctggccggcgtacattccggcgactctgcgtgtatcattccttcggtacacatttcagatgctaatgtacagacgatcaaagaatacacgagaaaaatcgctgaagaaatgcatgtaaaaggcctgatgaacatgcagtacgccatcgaaaacggcaaagtgtacgtgctggaagccaatccgcgcgcatcccgcaccgtaccgctcgtatccaaggtgtgcaacatccggatggtacctctggccacagacatcatcacctctgagatcacaggacgtccgtcaccggtgccgggactgaaagaacaggtgattccatactatggcgtaaaagaagcagtatttccgttcaacatgttccaggaagtagaccctatcctcggaccggagatgcgctctaccggagaagtgctcggtctgtcggatcattacggcgaagcattctacaaagcccaggaagctgctcagtcaaagctccctctctccggcacagtgctcatctctgtcaaccgcaaagataaggctgaagttgtagagatcgccgaaagctttgcggccgacggcttccacatcgtggcgacaggcacaacgtgcgacctcatccgcgaagccggcatagaggctgaaaaagtgaagaagctgtacgaaggacgcccgaatatcctcgatatgatcacaaacggcaagatacagcttattgtaaactcaccggtaggcaagggcagcgtacacgatgacagctatctgaggaaggctgccatcaaggcaaagatcccgtatatgaccacgatcgccgccgcgagagccacagccaagggcatccgttacgtgaaggaaaacggaaacggtgatgtccgttcactccagcagctgcacagtgaaataacagaaaagtaaacgttcagggcgcatcccctttgaaaagggatacgccctgaattttatcaatccttatgcaagaacagcccgtctccgatgcattttgcccagataaagctgtgtccgggaagcggcacatctctgagctccagcacggctccggtcattagatcgcggtatgttccttcctcctgcatccacgcggtacgctcttcatcgtggaaattaaagaggccgaaaaagcggctgctttttgtctgcctcaaaatgcagagcacggcgtcgtcttttacatcataagtgtacacatccgagtccgggccgaacgcctcttcctgtctgcggactgcctccagccggtccagcgtctgaaatattttcccctgcacggtgctgctgtccccgcgattttccacaaggctccaacagaatttaccgcggtgcacatatctggaatccgaccacttctccgcatcctctttgtaggagtaatcgttcacctgcccgatctcatctccactgtacagcatcggtattcctgactgggtgagcatgtaggcgtggagcatgatatccagacggatggcagcttccatcttctccgctgcatgttcaaatcccgcgctctcgatcccgcacatagatgcggtcgttccgcagaacctggcatccttcgtcaccggatcatcattgtacaattctccgcggcttcggctcccctcgatccggccggtaaaataatcattcaagaacttcttgtggctcacctcttccattccccactgctttaatgcagcgtagtcaagcccccagccaacgtcgtcatggcaccgcagataattgagaaaggtatattctttcggcagactgtttacgatgtccatctgctgcttcagaaggcgtacgtcccgggcagctacactgtgccacgtcgtcgccatcgtcgttacattgtagagcatatggcattccggcttttctaccgtaccaaaataaggcgccactttcgccggctccatcactacctcgcccagcagtacaacgctcggacatacgatctcactgataatacgcatcattctgacgatcgtgtgcacctggggcagattgcggcactgcgtgccaagctgcttccatatgtacggtaccgcatcgatacgtatgatatccattccctgattggcaaggtatagaaaattgtacatcatctcgttgaacacacgcggatttccatagttcagatcccactggtacggataaaaagaggtcaggacaaaatgtcccatatcatcaagccatgtaaagtttcccggcgccgtcgtcggaaagacctgaggtactgtcgcttcgtacatacgaggaatatcgtaattatcataaaagaaataacggctcatatattcaccgtctcctgccctggcttttttcgcccactcgtgctcctccgacgtatggttcatgacaaaatccatacacacgctgatccctttccggtggcactcatctgccagctccgcaaggtcttccatcgtacccaggtccggctttactttcctgaaatcagataccgcatagccgccatccgaacgcccccggggagaatccagaaatggcatgagatgaagatagtttacattgcacgacttcaaataagaaagcttctctttcacgcccttgagattcccggcaaaattgtcgatatacatcatcatcccgagcatatcatttttcttaaaccatgccgggtcttcctcccgcttcagatcacggtttctgagccttattctgcgctggcggtaatacgcgtacatctgagaagtcagctcggcaaacatggcatcgttgccgtacaattccatatagagccagcgcagttcatcatgggatttttccatccttctctggaaaatatcatccgcttttgacatgttcatctttccttcctttatacttcctccaggtatatctggtatgcctcatattcacacgcagccgccggaagcggaatgcctgcctccataagagcggcaccgcagtaccgctgaccggagctcatatcctcatacacggcgtcttccttcagccccttcggttttatataattcactgtcatatttccatggacatccagcgtcactgcattgagcagcacttttcttctgtcctccgacacaaaagcccaggcgccgatctcatcttcataaggactgctgaggcggtaatacgtgccattctgaatgagcggcgcatacttgcggtaaagatctgtctgctgccggatctccttcttctcctccccggagagagcgccaaggttcagctcatacccaaaggttccggccatggcagtcaccgtcctcgtgtacaccggtgttcttctccccgtctgatggttcggagaggcagacacgtgcgccccgacagcagacaccgggtatccgaaagaacttccatactggatcttcaccctgtctacggcgtccgtattgtcactgcaccatatctgaggcgtatagtacatcattcccgcatcaaaccgtccgcctcctcctgagcatccctcaataagaagatccggataacgcgccgtcagccgttccagaaaatcatagacaccgagcacatagtcatacagcacccgtccctgctcctctgtcccggcagagtacacgtcgcttaagcttctgttcatatcccattttacatactctatgttgccctggtcaagtattttgcagatttgttcaaacagagcgtccaccacttcttttcttgagaagtccagcacaagctgatatctggcgcggaccggctttcttcccggcacggaaagcacccagtccggatgggcacggtacagatcactgtcctcatttaccatttccggttcgatccagataccgaattttattcccatgtcattgatctgccggataagatcccttagagttcctccgagcttctcctcatttacatgccagtcaccaaggccgctgaagtcgccgtctctgctgccaaaccagccgtcgtccatcacgaccatatcgatgccgcattctttcgcgtcttccgccagcttccgaatcgtctcccccgtaaaatcaaagtaagctgcctcccagctgttgacgagcaccggccgcgccgcatccctgtatttcccccggcagacatgtgtgcggatacaccggtgcatatgctgtgacagccggttcagtcctttatctgtataggatagaatgacctccggtgcctggaatgtctcccccggtgctgccggataggagaacaattcatcctgcagccccatcatcatacgtgtctggttgaactggtctttttccgcctcgccggaaaatccgccgctgtatacaaaattcatggcataacagcttcccgcatcctctgtggcattcttatccgccaggatcataaacgggctgtactgatgacttgacgttcccctgcggctcccaatacggaagctcccgtgcggcacaggaatacgctggaagttccgctccatcgcatggcgtccgtaaaaactgatcacatcataatttccgcttaacaggtcaagacaggcagactggatgttctcaatatacacttttttctctcctgcattgacaatacgcacgctcctcgttatgatgtccagctcgggcagtacgccgtagagaagcacagcctgaagccctgaagcgctgtcctccattgttatctccaacgtctgcgcctcctgctctgtgccatacaccgcgggcagccccggcagatcatatttccctttgacgatcacatgactcctgtaacgcatatcacagcagtatgtgccgtccgcattcctcacagtgagcgctgctgcccggaaatctccgtttccccgacacgggaattcctgcggaagggcatccagggaatacgtcctgtccttcccggcctcatatggattgccggagaaacctctgtcataataagtcagcacatagtccatacagccttctgccagttttccgtaataaagatgaagcaaaaatccgtaccggtccacctgcatctgatacgttgtgctctctgtattgagtgtaaatgtcttttttctgtcatcatagataatagccatgtgtccctctccttttatcattcttatttcagtcatctgcggatacgtttactgtcttcattataacatcctgcggtccactgctaaatatcagcgtattttcagttttataccaaaatgatgttttttcccatataataaaaagttatctagcattttggtatatatggatatatactataagaaaagaaaggagcatgatctcatgagtaatcttctgttttctgtatttccaaatgaaaactttatcgatctggggctttaccagtacggctgggaacaatgcagtccttcccattccttcggccctgcggccagaaatcattttgtgttccactatgtgatatccgggaccggccgcctgatggcagacagttccgacggaaataccaggacatttccgataaaaagcgggcagggatttatgctctttcccggacaggtcaacacatatgtggcagataaagagcttccatgggaatacacatggatagaatttgacgggctgcgggcaaaagagatggtagcgctggccgggctgacaaaggatatgcccgtatatcacgctgcttccaaagaaatgtgccggaatatgatggatgagatgctctatatcgccaggcattccaatgaaactcctttccaccttatcggacatctgtacctgttccttgactgcctcacacgttctgccgcgtcgctgaagctgagacagggggagcgcatccgtgacttctatataaaagaagccctgtcctttatcgaacagaacttccaaaatgatatttccgtagaggatatcgctgcgttctgcggcctgaaccgaagctatttcggtaaaatattccgtgatactcttggaaaacctcctcaggaatttctcatgagctaccgcatggcaaaggccgctgaacttctgaaactcacaaagctttccgtcagggacattggaaatgcggtcggttatccgaaccagctgcatttttccagagcctttaaaaatatatacggcatatcgccgcgggactggcgcagtcagaacgggatgtcttattgagctgctcctgtccataagtaactcttctcagtcagggcttaccatacagatgatctttgtcagaaaatcttcctcctgctgtactgccagtccgtccagcagataatcttcataaaaatgttccgacagttttagtccgttttccgtagcgtaatcgacgagacgccggtatgccgttcctatatcctgccattttcccttgtggtaagctgtcacatactctccttccggccgtacttcacatgccaccttcttcggttttacacgaagcagctgatacagcgtccggtaattgtcataactgccggccataatatccgaaagattctgcctgaaccctatgccgtgcgagctcctgactccatgctcctcacagtaatcaagaaaatttccgacctctatactccatcccatctcatcactgctctctatcccggacagtaccatatacattttttcctcatggcgcacacttatctcttccggcgaagcagcgattccggcgcagatacaattcgtcttctcctccatccatctctgcatctgtctcagcttccgcatccgctcctcaatgatacggctctctttcttaaataatctcaaaagactctccggtgttcttccgtctacatactccttgatctcctgcagaggcatattcagttcttttagtgtatatatgatctcaaatatatcaagctgggagaatgtataatacctgtatccattgtcaagcttcacttccggacacagcagcccgatggcgtcgtaatgaaacagtgtatgcttcgtcacgccggtcagccttgcaaattcccctgtggtcagataactttctttcttttttattgccatatttgtaatctcctcttgactatcgggttaccctataccttatcatagcaattatcggacaaaaacacaacccggacaaatgcgtccggccttaaaatagaaaggaggattccaatgtcgaattccatagcaaaagatttcaaatttttctctcttctccgcttcgcggcgcctaccatcattatgatggtgttcatgtctttatatacgatcgtggacggtatttttatctccaggcttctgggcacaaacgctctgtcctccgccaacattgtctatcctgtattgaaccttgtcatagcagtcggcgtcatgcttgcctccgggggcagtgccataatcgcgaggaagtttggcgaaaacaaagggcaggaggcccgcgaggacttttcactgctcattatcgttggaattgcagcaggatttgttattatgaccgccggcaatctgtttatagaaccgatcgtccgaatgctcggagcaacggacttgctgctcaatgatgccgtcagctatcttggtgtctctttgtttctcgcgcctgcttgtatcatgcagctgctctttcagacgttctttgtgaccgcgggcaggccgaatctgggtcttctgctcactatcggcggaggactgacgaatatggtccttgactatgtctttatggggcctcttcagatgggaatcagcggcgccgcgctggccaccgggatcggacagcttgtacctgcggttttcggagtcttttacttctttttctcaaaaggctctctgcatcttacaaagccgaagttccggggaacggtcatcctggaaagctgtctgaacggctcttctgagatggtgacaaatatatccgctgcagttgtcacctacctgttcaatatcatgatgctccgcttcctcggtgaaccaggtgttgcggccatcacgatcgtactgtacggacagtttctgttcaacgccatgtatatgggcttctccatgggggtagcccctgtcatcagctacaattacggaagcggcaatcagaaactgctgcggcggatatacagaatatgtatctccttcatctgtgtatccgccgtcattataacactgtttgctctgctgtcgtctccatatatcgtggagatcttcacaccggcaggcacagagacatacgagatagcaagaggcgggtttttccttttctccttcaactatctctttgccgggataaatatatttgcctcggcgatgttcaccgcattctccaacgggaagatatctgccattgtctcatttgtccgtacctttgtgctcatcgtggcaaatatactgctgcttccgtacctgatcggggtgaacggtatctggctctccgtacctgcggccgagtgcatgaccgttcttctgtccgtctatttcttttacaaaaagaggaaagactatcactacatctaacgtatactactgtatatcattctcgtcaaaccggtctccgcactcggggcagaacttcggcggactcttcgggtctgccggttcccagccgcatttgtcgcagcggtaaagaggttcccctgccggcttcttcgcgccgcattccggacagaacttgcctttattcccagtatggccgcacacgcacgtccatccgctgtcaggcaccgcacttccctgtaccggggcggtcccgccagttcccgccatggacggattctgcgcatactgagacgaaggaacattgttctgtcccatctggtaaagtccctgtgtattcattcctcccatattctgggccattcccattcccataaaagccatcgccggcccggcattctcattattagccgctgcctgcatcgctgctgcctgggctcctgcgatctgtgccgccgccatagtaggatctctgaacgctgcattcctctgcagttccttgatcatagcttcatcttcctcggaagccttcaggctggagataccgaaggaagttatttcaatcccccgcagatttctccattttgccgaaaggatattattgagcgcatcggccacttccatcgtatgtcccggaatcgcgctgtagcgcactccctgggcggaaatctgggcgaatgccggctgcagggcggtcagcagctcactcttcagctggctgtccaactcttccctcgtataatcatcgtctacatttccgcacacatttttataaaacaacatcggattgacgatccggtaagaatactcgccgcagcagcggagcgcgatatccatgtcaagccctacattactgtcaacgacacggaacggcaccggattggccgttccgtatttattgcccatgagctctttcgtattgaaaaaatatactctctggtctttccctgtatccccgccaaacgtaaaccgcttcttaaacgtctcccacgaccggcccagaccttccccgaatccgccgtagaatatcgtaggctctgtggaactgtcccagacaaattctccaggctccgcggagaattccaccaccttgccctgctctacgatcatcatacattggccgtcattgactgcaatgacagaaccgtttgtgataatgttctcactgccctttttattgctgctgcgtttggatgtgcgtttcacccctttggctgccagcacctccgcctcaagtgattcacagtagaaatactctctccattgatctgcaagcactccattcgacgcacctgcgcctgcttttagtaatcccatattcttttatcctcctgtcttaaaactttcctttctttcctccatgccgctctccgctgcggctcacatgagtcgtggacctgtcgtaccggtttccctgtccgggattcgtcctgcgcggatcttcttttttaatctcccgttccacggttcgggaataaagaaagatatcctgctttttcgtcagctcatagctctcctttttcatatatccgtccgcctgttcctgtctgcctacgtttttcatcctggacatctggacagcgatataaatggctgttacgataattcccactgtcacggacatctttgccatgttgagccacgggttgacttccttttcaggcgccgcagtttcctgttctgccgcttccgtcatactgccttttaaagctccgtcggcgcctgtaacgctgtttccggacttggccgcttccggcgccgccgtgctctcctgcaggccttcgctgctctttgtcccgttgtcctgcagataaaattctacgtcgtgaagatatgtgtcaaatgcatcataatattcatcttcactcaaatatgtcagcatccgtccactgatctcatcaagacggtaatcggtgaataagtcaatggccgctccatgggtcgtaagcgaccagtcgcgctctttcatacttacgagaagcagaattccgtccttctcctctccggttccgtatccctctgtatcaaaaatatcatctgccgccttctgcgcgtctgctccataaatactctctctcgtgacaactgcgatgtccatcccatactggccggcaattttttccgcctttgtctcaagatcacttacttctgtgtaggaaagcagctttgcgtcgtctgtaatatgcttcgggtgtgtccccggttcctgcgccataacggtcaccgtcccaaatccaagtgtcagtacgagcatcaccgccagccataaccgcttcataaatgttccccctctttcttttctcttatgttaaagacaatataagcctgacgatattcaggaccgcaaacatggccgccgtacttcccgcaaacataatcgcggagcgtttcatgagctgtcccgaggacaccgggaaatttccggctatcttgcctgtctgcccgttgatcatgtactgatattgctttccgctgtaatcaatatccattacccatactggaagaagtgcatactgtacttttccgtcccggcaggtgacttttgactccttcggtaccacggcggcatatctgccgtcattggccgttttccgtaagctgtcctcaaaactctttttgatccgctcatttgctctcggttcgcactcttccacactcacatcatacttctgcgcgtcaaagccggacagatatgcctcctcaaacggtacggcttcttctgtattgtatggttcgatagattccatatatgtatcgtccatgagcacagatccgtccacgggaacatggtcgaaagagacctgcccttccctcagcagcatatagtgatccgtctttacatattccttgtttccgctcttccacctcgtgacctttgtcccctcatagttggcacatccgtccgcaacgcagctgaacagccagtaaggtacatacacacctttcatcccgcttattttctgttcatctgtaaaatccttcggcagaagtcctttccctttacagaaacctttatagatgtcctgcgcctcttttttgctcactttaaacggaatgacaagatccggcttatattttcccgaaacctgccccggcagtatggcagaactgccgcagtacggacattcggttgctatagtcgtatcgtctgcctctatctctcctccgcaggaaggacatatgtataccctttctccatctttttttctttccttccattccactgccgaatgcttccattcataatggtctttttcttctgcacgctccacggccttttcatattcttcaaaagtgttcagttcaaaatcattttcgcagaatggacagtgcagtttctgcagctcactgtgaaacacgagatttcctccgcagcagggacacttgtattctctgacgcccatattgttcctccttctcccagcgttattcactttctcttattgactattttaacagatttgatatatttatgaaagtataaaaaacagctggtaattattggaaattaccagctgtctttattcatttctaagactcataataccttccagcaatatctttacatcgtccagtatatagtcaaacgccccggcctggaacagattgatgacgatcattcctatcggaactgcaaatatcatcccgagcacacttcccactttgtacccgacatagagcagcacgagcgtcacgagcggattcaggcccatgctgtcacctacaagctttggctggatgagctggcgcacgagctgtgtcacggcgtacagcgccatcagcgcgatggcgagcctgtagttgccgaccatgaacttgtaaagtgcccacggtatgagtgccgtacctgtcccgaaaaagggcagaaaatcaagaaacgcgatgagcagcgccagcaatatctgaaaatgcactcccatcagcagaaatccgacaagcagcagcgcaaacacaacgaccatgatcttcatctgggctttaaaatatccccccaccgcatattttatattgtcgatcaccatactcatacggcgcacgaccggatcaggggctattttcttggaccatgcgatgaccgcttccctgtccgcgataaaaaagtaggccgatataactgtgacaatggtggcgatcagcaccgaaggtatcttctttgcaaagttgcctgccgccgttacggtcggttcactgatcctgcccatcagatcgcctaccgtgctgtccagattacttacgatggcgtgccagccgttctggatgcctttcggcagtatggtaaacactccgtccagcgtctttccgatgtcactcaggccgctctccagctgcttatacagatccggcatgttctgaaccaatgacacgatctcccgccacagcctgcttcccgcaaaatacagcagaaagacaagccccgcaagtacacctatgattataatggcggaaccaagcttctttacaattttaagcctccgctccagccagttgacgaccggacttgcaatgaaggcaatgaaccagcctatgacaaaaggcataaagaatgccagcagcctgactccgagaaatatgaacaggacagttccaagcaggctgaacgcaaggcttacgatcaccttccagtacggtctgtcgtcatgaagcttttctttaatgtctgtccgcatccactactccacctcttgtctgtccagatattctgtctccaccagctcccatatctcatctcttccctgctttgtcatggaagagaacggaatgacctttgtccccggaatgagatccagtcctgtcctcagcattttaatatgcttatctacctggctgcgctttattttatccagcttcgttgcaatgatgatcggctcatacccctggtccacgatccagtcgtacatcattctgtcattggccgacggctcatggcgtatgtctatgagcagaaacactgctttcagctgcccggagctgtgaaggtagcgttctatgagctgtccccatttcatcttttccttctcagacaccttcgcgtagccgtaaccgggaaggtctacaagatacagttcattattgatattgtagaagttgatcgtctgtgtctttccgggagtcgctgaaattctcgcataggatttccggttcatcagcgcattgatgagcgatgatttacctacattggactttcctgcaaacgctatctcagggtgatcgttgtccggcagtatacttgtgatgccgcacactgtctctaaattaatatttctgataatcatatcttttcctctttgctgtcatcggcagctataccaacgctatttttaatacttcgtccatgtgggatacagggagtatctccatgcctttctttatctccgaagagatgtcttccaaatccactttattttcctgcggtatgatcacggtacggatgccggcattcttagccgcgagcagcttttctttcagcccgccgataggaagcacgcggccgcggagtgtaatctcgcctgtcatggccacatctgccctcaccctgcgctccgtcacggccgatatcatcgccgtagccatcgtgatgcccgcagacggaccgtcctttggcaccgccccttcaggaatgtggatatgtatgtcgtgttccttaaagaacgtctcttctatgttgtgtgccgcgctgacagaccggatatagctgatacctgtcctggcggattctttcatcacgtcgcccagctggccggtaagcagtatctctccctcgccaggcatgatatttacttctatctggagcgtatcgccgcccacacttgtccatgcaagtccgcgcacgatcccgacttcatccgacgcattggccatctggtatgtatacagctctttgccgagatacaggtgaagattgcgctctgtgacatgtatggcaggcttctttgtctcaaggatctccctggcggcttttctgcatatttcgccgagctttcgctccagctggcgtacacccgcctctttcgtataatttctcgccatcttccagacagctctccggctcacggtgagctgttccggctttagcccgtggcgccggagctgctttggaagcagatgctccatggcaatgtgcattttttcattctcagtgtaactgctcacctcgatgacttccattcggtcgagcagaggtcttgggatcgtctgcagtgtattcgcagtcgtaacgaacaatacttccgacaggtccaccggcacttctatatagtggtcgcggaacttggagttctgctcactgtccaacacctccagcagcgcagaaaaagtgtcccccttgtagtcattgctcactttgtctatctcgtcgagcagcatgagcgggttcttgacgcccgcggacttaagtcccgtggcgatccttcccggcatggcgcctacgtatgttctcctgtgtccgcgtatctcggcctcatcacgcactccgccgagggaaattctcacataaggctttttcagcgcccttgccagtgattttgctatggatgtcttgccggtgcccggaggtccgacgaggcagagtataggtgtgtcccccttctttgtgagggcgcgcactgccaggaattccagcactctctccttcactttttccaggccgtagtgatcttcatccagcactctcttggcataggcgatgtctttgtggtctctgcctgcgttgtcccacggcatctcaagaagtgtctcaatatacgtgcgtacgacgccggtctctgccggattgcccatcgtgttcttaaaccgcttgatctccttgttcagcttttcctttacttccgcaggggctttcagtttatccgccgcctcctggaactcatcagcgtccgacatcgtattgtcgtcgccgagctcctcgcggatgatcttcatctcctcccggagaatatactctctctgatttttatccacccgctctttcactttcgcctggatctcttcttttatattgatgatctgaatctcacttacgagccttccgaccaccttatcgtaccgcttcagcacgtccggctcttccagcagttcctgggcattctcccaggagagcggtatattggccgctatctcgtccacaaggcggcgcaggtctttgatctcctccatctgaagcgccagatccttggacagcttcggattgcggggaagatactcccggaacagatccttaagtccccgcagcatcgcctccatgttgagcgggttttccttcgcgccgaccgcttcctctgcgttatcgatatccgccacctcaacgacattggcgcgcaaatacggctcgtcatattccatacagtccattctggcacgcgtctcacctgtcaccaaaattctgcttattttcttcggtaatttcacgatctgcttgatggatgcaatacagcccaccgcgcagatgtcattcatgcccggattctctttctcaatatccttttgagctgtcagaaaaatcttctgattttcctgcatcgcctgctcaattgcctcaattgatttctccctgctgacgtcaaaatgagtaaccattccgggcaatacgaccatgccgcgcagggcaaccatcggtaaactattcacttcatttgtcatacaatttctcctatttcgaaaggggtcagacccctatggtacataggggtctgacccctttgacaatttaaaacaagcgggcacaaaactgattctgcacccgccttttattaagcactttctgatctgacggcagtgtgttcacactccggctctccgattccttttactacctcttttgtgatacggcatgtcttcaatgtctcatctgacggagcgcggtacatgatatccatcatgacattctccatgatcgcgcgcagtcctctggcgcccgtcttacgcttcagggatgtctctgctatctcttccagcgcatcttcgtcaaagataagatccacgccgtccagctcgagcagtttctgatactgcttggctaacgcgcttctcggttctgtaaggatacgcatgagcgcttctttgtcgagcatctggagtgctaccgtcaccggtacacgtcccacaagctcagggatgattccatacttcacgagatcctgcggcaatacctgattcagcagacggtccacatcattctcatgcttctcggtgatatctgcgttgaatccgatcgccttcttgtctatccggttctcgactatcttttcgatcccctcaaatgcgcctccgcatatgaaaaggatatttgtcgtgtcgatctgtatcagctcctgatgcggatgctttcttcctccctgaggcggcacattggcaaccgtgccttcgacgatcttgagcagcgcctgctgtactccctcaccggatacatctcttgtaatagaaggattctcggactttctcgtgatcttatctatctcatcgatatagatgatgccgtattccgctctctccacatcgccgtcggcggcctggatgatcttcagaagaatgttctccacatcctcccccacataccctgcctctgtgagcgcagtcgcgtccgcgatggcaaacggtacgttcagtatcttggccagtgtctgggcgagcagcgtcttaccgcatcccgtcggcccgagcatgaggatattgctcttgttgagctccacccccaggtctttctgcgccattatccgtttgtaatgattgtaaacagctacagagagcactttcttcgcctcatcctgcccgatgacatactcatcgagaaaatctttgatctcttccggtttcagaagattgatatcggcaaacggattccagtgccttctgtcgtcatattcaaattcttcttcaatgatctctgcacatacatcgatacactcgtcgcagatataggctccgttcggacccgcgatcagcttgcgcacctgcgactgtgtcttattgcaaaacgaacatcttacctggtcgtcgttctttcctgccatgctttcacctctctgggacattccgccggcttttagcggttcttgatgacttcatcaatgagaccgtaagcctttgcttcctccgcagacataaaattatcacgttctgtgtcaatacggataacatccagcggctgtcctgtattctccgccaggatctggttcagtctctggcgggtttttaaaatatgttcagcagcgatctgaatctcggttgcctgtccctgcgcaccgcctgacggctggtggatcatgatctctgcgttgggcagcgcaagacgctttccttttgttcctcctgcgagaaggaaggagcccatgctcgcagccataccgatacagatcgtttctatatcagatttgatatactgcatcgtgtcatagatggcaaggcctgccgacactgaacctcccggactgttgatatacagatggatatccttctccgggtcctctgcctcaaggaataataactgagccacgatcacactcgcggacacgtcagttacctcttcccccaaaaatatgattctgtcttttaataatcttgaatagatgtcgtaggagcgttctccgcggctggtctgttcaatgacataaggtactaaactcatgtattcgtctcctcctgactgtgcgatacggcttatttctctacagcgttctccacaaggaacgtcactgcttcctgaacagccatatcttccttcatctgattcttttcattctctcccataaactctttcagtttatcgacttccatcttatatgactcggccatcttagccagttcttcgtcaactttctcatcattgatctcgatgttctcagcttttgcgatcgcttccagcacaagacgtgtctcaatgcgcttgatcgcctgcggtctcatctcctcgagcatcttctctgccgtcatgcctgtaaactggaaatactgttccagagagataccctgagactggatcctctgcgcaaaatcatcagccatctgtcttacctgtgtctcgatcatggccttcgggatttccatctctgcattcttaaccgcctgctctacgacctgatcttccttcttcgtcttgccttccgcagctttctcatctttgagctttaccttaacatcagctttatattcttctaatgtatcaaattctgaaacttccgccgcaaattcatcatctatctccggaagctccttcgccttgatctcatgaaccgtacacttaaataccgcttctttccccttcagttcctctgcgtgataatcttccgggaatgtgacattgacttccacctctttgcccgcctctgctcctacaagctgctcctcaaatccggggataaaagagttggaaccgatcgtcagcgggtaattctcacccttgccgccctcaaacgctgcgccgtcaacaaatccttcaaagtcgaggatgacctcgtctccatcctgtaccggacggtcttcgactgcaaccgttctcgcgttcttctctgcctcttcctgaattctggcatcaacttccttctgtgtcacgcgtgtggagaccttgtctacttccagtcccttatactcaccgagcgtcacttccggttttgtagctacttctgccgtaaaaacaaatggtttgcccttttcgatctgaacaacattgatatccggctgggacacgatgttcagctcacactcctcatatgcatcagaataagcctttggaatcagctcatttgccgcatcatcataaaagatctccgcaccgtacattttttcgatcatctggcgcggcacttttcccttgcggaatcccggcatattgatttttttcctctgcttcatatatgcactctgaagcgctttctctaaatcatcggcaggaacttcgatggtaagttttgccatgtttttttctaacttttctacctgtaaactcatttttgctatttcctcctgtttctgtcccgcctttcaaccgccggaaagatgggcatgctacattacattcactaaagaagtataacacaaacctctctaaatatctagccttgaatttcatctagcctaagtatttttataacaaggttgtccatatcatcttcgtcaatggaatactcatttctcttatctgcatttaccttcactatgaccgtctttgcgtcctggaattccatctcagaagacgccacatcgagcagttcataggcgtggttaacaatatcgttcaggatctgctgcctcacctcatcatccgttcccttgtagactccgtccttcacatcctgagcgatcttaatggaatcctcggtcaaaagctgctgaaaacgtatgaacacgtccgacggctggatctccaccggcacctcgaactccttcttcccagtcttgtccgcctcccccacgctgtaacgcatcacggaaaatatctttgatacgagttccgcaaactggctcgtcttcaagtctcccatgtcaatctcattcgtaatgttgttggcgacaaacgtatcgataaattccttgtactgtgctttcagggcttccgtcgtggagccttctatcatctcctgcgccttctgcgtctgtccctgaaagttcaggtccagcacccctttcacatatcccgacgcgtcaaaatcacggccgcagccggcgctgccggccgccagcatgatgcagagaataacgagcagcgccggtctcaaatgtttcttcatattacgatcctttttcttcttattcatagacgatggactctgcgatctctttagccttatccttgcccataagctgctcgatgatcttcagcgaaaagtcaatggctgttcccgccccccggcctgtgatgatatttccatccaccgtgaccggcgcgccggtaagaactgccccctggatctttgtctccatcgtcggataacatgtcactctcctgcccttgagaagcccgagattgccgagtatagtcggcgcggcgcagatggcagccacagtcttgccttcttctataaagtctttgacaaccctgcgcactccgttgtgttcctccagattgcgcgtgcccggcattccccccggaagtacgatcatatcaaactcgacaaagttcacctcgtcaaaaaggtcttccgtctggacattgatcccgtgcgccccgtgcacgacatactcctctgcggcggatactgtgtccacatatatctttgcccgccgcagcagatctacgactgtaagtgcctcgatctcctcaaatccgtccgccaaaataacgcttactctcttcatctgaatcctccttactgattacaaaactttctaaaaactccctgtacggccaaaaaaagccatcatggataaatagtatcaaactacctgcaaaaaagcaaatacgtttacattttcctgaatctatattatcataactataaaaatgaaggtggtgcaatttatggaaatagaacgcaaatatctcgtatcccggctcccgggtgatctggacggatatccgtgccgtatgatcgaacagggatacctcaatacagcccctgtcgtgcgcatccggcgcgacaatgaaaaatacgagctgacgtacaagtcagaaggccatatggtccgggaggaatataaccttcccctcacagaggaagcttatgagcacctgctcacaaagatcgacgggcgtattataacgaaaaagcgttatatgatcccgtatgacgactccctcacgatcgaactggatatttttgagggcagtctcgcaccgcttaggctcgctgaagtagaattcccggatgaagcaagcgcttctgccttcactccgccggactggttcggggaagacgtcaccttctccggctcatatcacaacagcgcattgagcagattataggcaacttatcgttgctttattgtaaaagacaacgtttcggcgcatagatatctatttattggacaaattgctatactaacaagtaaagttacttgcggaggttagcagccatgccaaacatacaactggccaataatttacgatatctgagaaaacagaataaactgactcagaaagatttgagcgagatgctgaacatatcccgtcaggcgtactcaaactatgagacgagcaagcgtacacctgacctggattcccttctgtatctggccggcttttataatgtcaatctggattccctcgtcctcggcagccttccgtctcctgaccaggccgacgccgctgcttccgaatcgatcgctgaacagaagattccttatacgctttctgtagataaaaataccggtaattctatttatctcactgaggaagaattggagatcatcacaaagatccgcacactttccagagaaaacaaacagataattaccggttttattaatgataacgccgcgcctgacgtctaatcgttcaccgcaaatccgtcgtgcactgcgatcatagcctgttcaatatccttctcatccacaagaaccgtgatccttatctctgatgtagagatcatattgatattgattctggagttgtaaagtgactcaaacatctttgccgcaactcccggattgctcatcatccccgcgcctacgatggacagcttcgcaacttcttcttcccatgtgatctgctgtatcgtgagcctgtctttatttgcctccagcaccttgatcgcgttttccagatcattgtccgccactgtgaaagaaatatccttcgtaccttcacgccctacggactgcagtatgatatctacattgatattgttcttagccagcgtatcaaagatattgaatgcgatccccggcttatcctgcactccgatcacggagatcctcgctgtatttttatcggctgctacgcctgtcactaacattttttccatatgtgaagcctccttgactacagttccctctgaacggttcagactggaccttactactaattctacattatatttttttgccatttccactgatctgttgtgaagcacttttgctccgaggctggccagttccagcatctcgtcataagtcaccacttcaagcttcctggcattttttactattctcgggtcagctgtgtacacgccgtccacatctgtatatatctcacacttatccgcgtgaagcacagcagccagagccactgcagtcgtatctgagccccctcttccgagcgtcgtgatgtcgtcgtatttgttcactccctgaaatcccgtcacaataactatcttgcgggaatccagttcatggagaatacgctctgtatccacacgtttgaaacgggcattgccgtatctcgatgtagagtgcatcatgacctggaatgcattgagtgatactgccgggacatccagcgcctgcatcgccatcgccatcagtgataccgacacctgctcccctgtcgtgagcagcatatccagctctcttttctttgcattcggattgatgctttctgccatcccgatcagatcatctgtcgtatcgcccatggctgacaatactacgacaacgtcatttcctgctttgtaatcttcaatacagcgctgtgccacattaaatattctatccttgttggcaacagaactgccgccgaatttcttaacaactaacataaattcctcccgcattcctcttttatgaccgtgctctgccgagcagatgcccaatcaatttgtacccgtccggccagtatattccggtttcagaagccgtcttctcatcatatgcatccgtaccttcatacggcgccgtactgtcatacagaagatacgggacaggatctcctgtgtgagtgcgtacttcgatgggcgtaggatgatccggaagaacaaggatccggtaatctgcgccggcgcgctccatcccttctgtgatcttccccgcgacgagttcgtccacccgctctatcgccgtgatcttatctttcatactgccctgatgccccatctcatccggagcttccacatgaatataggcaaaatcataaccgtctttcgtcagcgcgttcaccgctgccatggcctttcctgtatagttcgtattcagcccgccgttggctccttccacttcgatacagtccatgccggccccgacagcgattcccttcagcaggtccacagcagagatcattactcccctgagtccggtcatctcttcaaatgacttaagcgccgggcgcctgccggctccccagaaccaggcagagttggccggatgcagccctttccttctacgctctgcgttgactggatggttttccagtatgtcataactctttttcatcatctcccggaggacagcatcctccggcagatatgctccgatcctcttcgtcaggatatcgtggggcggcgtcagctctgtctcttttccctgcttcataataagcagatggcggtagcttgtgcctgtgtagaaccggtatccctctctctcaagcccttctctgagcgcatccagaagcaccgccgcatcttccgtactgatctcatcagaactgtgatcgatgatcgttctttcctcatatgcacagtcctcctcggacagtgtgacgatattacaccggaaagacacatccgtatcttccatatcgacgccgatactgagcgcttccagcggagagcgtcctgtatagtatatgttcgggtcgtaccccatcacagcgagattggccgtgtcgcttcccggcgccattccttccggcaccatggaaaccatgcccacttccgccttctgtgcaagccggtccatgaccggggtgcgtgcggcctcaagtgttgtcctgcctcccagctctttaagaggacggcctgccatgccgtcgctcaacacgattatgtatttcatgcttcctccctgcctctgctattcctgaatacgtatcatatgcagtatctcatctttatatattcccgcccgcgtatcataatcgccttccatcatgaccggggtgataaatccaaattcaccgtcaagcccgtctgcatgtacgatctcgatatcgccgaaggaatccctgagatccgcaagcatctcctgcacatcccctttcatgcggatgaagaaacgccgtttggcgtctgccttatcctcgagcttaagcttatcctgcttccacatcgtcatgatattgcggttcagatgctttgccgcatccacgacatcggccaccaccgcgctggcagtcggaagcttgcctgcgccgctgccataaaacatcgcgtctcccaggacattgccgtgcacgaaaatggcgttgaacactccgtttacattgtagagcggatgtcccggatagagcatgcacggcgccacgatcgcgtgcaggcggttcccgcggcgtttgctggatgccagcagcttgatggtcgtccccattgccttcgcatatttcatatcttccgccgtgatctttgtaatgccctcacagtagatatcctcaaaatcaacctgctgtccggagatgagtgaagacaggatcgcgatcttcctgcaggcatcatagccttccacatccgcctcaggattgcgctccgcgaaaccgttcgcctgcgcttccttcagcacttcatcgtagtctgccccctcatagaacatctttgtcatcatatagttcgtcgtaccgttgagtataccagtgatctcttcgatctcatctgccgtcagcgaagagttcagcgggcggatgatcggaatgccgcctcctacgctcgcctcaaaaagaaagttgatgccctggtcctttgcgatggacagaagttccgcgccatgcttggccacaagcgccttgttcgacgtggcaacactctttccggcctgcagacaccgcttcacaaaagtgtaagcaggttcgatgcctcccataacctccacgacaatcttgatatcatcgtcatttatgatcgtttcaaaatcatgaacgatcttatcctggaccgggtcgccgggaaactctttcagatccagcacatactttatattcagttcatcgccgatcctctggttgatgcgggcgccgttcgtacggacgacttccacaacaccggaaccgactgtcccgtatcccataaccgctatatttaccataaattcctccctttagctgttggccgagtatttcagatatgcattgatgaacatatcgatgcccccgtcgagcacagccgtaacattactgcattcctcgttggtacgatggtccttcaccatagtgtatggctgcatgacataagatcttatctgattgccgaagccgatctctttcacctcgcccctgatgtcagacaccttttccgcctgttcctgctctttgagaagctgcagcttgactttcagcatctgcattgctttctccttgttaaagtgctgggaacgttcattctggcactgaactacaatgcctgttggaagatgggtgatacggatagcggacgacgtcttgttgacgtgctgtcctcctgctccgctggcccggtacgtgtcaatcttgagttcctcgtccgcgatctcaatgtcgatctcatcctcaatatccgggacgacatcacatgaggcaaaagaagtctgccgttttcccgccgcattgaacggggagatgcgcacgagacggtgcacacccttctccgacttcagatatccgtaggcattctcgcctttcacctcaaacgtgaccgtcttgatgcctgtgatatcgccgtccagatagtcaagcacttccatcgaatagccttttcgctctgcaaaacggctgtacatgcggtagagcatgcccgcccagtcgcacgactccgtcccgccggcgccggcatgtatcgtcacgatggcgttgcacgcatcgtactctcctgacaggagcgttctgatgcgcagcgcctcgaactgttcctcaaagctttgaatctctgcttccatctctttcaccgccgaagcgtcattttcttcgtaagacatctcgatgagcagattgatatcctcatatccgtcatacagggaatgaatcgtcttaacaagctcctgcaggtctttcagttctttcattatctgctgggattcttccggtctgtcccagaatcccggctcctctatctttcgttccagctcttcgatccgtttctctttgccagagacgtcaaagtgaatccctcatctcggcaagaggttcttcgtaagcattcataatacttttaaatgcatctaattcaaccatattgtcacctctttctttttttatttgcgcccgcagcactgtttgtatttctttccgcttccgcacgggcacgggtcattcggatatactttcttctcggcgcgcctcttcggctcatgcgccgcgctctcgtctttgtttgtaccggtcactttcgccacctgctcccgctctactttctgttcgatccgtacatggaacagggtgcgtatcgtgtcctctgtgatactctttgtcatggccccgaacatatcatagccaagcatcttgtactctaccttcgggtctctctggccgtaagcctgcagtccgatcccctggcgcagctgatccatatcgtcgatgtggtccatccacttggcgtcgatcaccttaagaagcacgacccgctctatttcacgcagatgctccggttccgggaactctgtctccttaagctcataagacttcaccgcccgctccttgagcagatgctttaattccttctggcttatatctttgacatcctcttccgtgacggcctccatcggaacgacattgtggatcgtcatattcagttcctggagattccagtcttccggctcatcgtcaggcgacacgatcatatcaactacattctccacataatcatttatcatatggaagatagaatcacgcatattctcgccgtccagtacgcggcgtctctcttcatatatgatctctctctgctcattcatgacctggtcatattcgagcaggttcttacggataccgaagttgttgctctcgatcttctgctgtgccttctcaatggcattggagagcatcttgtgttcgatctgttccccgtcttctacgccaagcgtcgtaaatacgttcataagcctctcggaaccaaacaggcgcatcagatcatcctcgagagagatgtagaacctcgattcgcccgggtcaccctgacgtccggaacggccgcgcagctgattgtcaatacgccttgcctcatgccgctccgtaccgatgatcttcaggcctcctgcggctctcgcctcgtcgtccagtttgatatcagtaccacgccccgccatgttggtggcgatcgtcactgcgtcatggataccggcctgggccacgatctcagcctcctgctcatgatacttggcattcagaacattgtggggaatgcccctctttttcagcatactgctcagaagttcggaagtctcaatggtgatcgtaccgacgagcaccggctggtgttttgcgtgcgcctcttctatctcgtcgcacactgcccggaacttttccttctgtgtcttatatacggcatcttccagatcgatcctctgcactgccacatttgtaggtatctccaccacgtccatgccgtaaatgtcacggaactctttttcttctgtgagcgcggtaccggtcataccggatttcttgtcaaatttattgaacaggttctggaacgtgatcgtcgccagcgtcttgctctctcttttcaccttgacgtgctccttcgcctcgatcgcctggtggagcccgtcggagtaacgccgtcccggcatgatacggccggtaaattcatccacgatcaatacctggtcgtccttcacgacatagtcctggtcacggaacatgaggttatgcgcccgcagcgccagtataatattgtgctggatctcgaggttatccggatcggcaaggttctctatatggaagaatttctctactttctttacgccgtcctcggtcagattgatatttttctctttttcgttgacgataaagtcgccggtctcttcaatgtcctcccccatgatggcgttcatcttggaaaattcaccgctcgcctctcctcgttccagctggcgggcaagaatgtcgcacgcctcatacagttttgtggatttgccgctctgtccggaaatgatgagcggagtcctcgcctcgtcgatcaatacagagtcgacctcgtcgatgatggcaaatttaagccctctttggacgagctgctctttgtagatgaccatattgtctctcagataatcaaatccgagttcattgttcgtcacataggtaatatcacagttataagcttcccggcgctcatcgttatccatgctgttgagaacaacgcccactttcagaccgagaaattcgtgaacctgccccatccattcggcgtcacgctttgccaggtaatcattgaccgtgacgatgtggacgccctcgcctgtcagggcgttcagatatgcaggcagcgtagacacaagcgtctttccttcaccggtcttcatctctgcgatacgtccctggtgcaggatgataccgccgatgatctgcactctgtaatgtttcattccaagtgttctcaccgccgcttccctgacaacagcaaaagcctccggaagaatgtcgtctaacgtctttccctccttcagcctttctttgaattcccgtgttttatctctcagctcgccgtctgagagcttttgtatctcaggctccagagcctcgacagcgtccgctatcggatagatcctcttcagctcgttctcgctgtgtgttccaaatattttctgtattaaacccatactgcgtgtttactccttgtccgtaaatttactctatccctcattctagcactatacaaactccaattcaacccgtttataaagagttcacaaactgttaatttactcgtcatttgtatcgtttcaccgtatcatacggcactttcccgccgaacagatccagggcgcttcctattgtaaagtccacgctgccgccggacacctcccggaaatgttccagatcctcaaggcttccgatgcctcccgcataagtcacaggaatcccgccccagccgccgagcatcctgacaagcccttcctccataccggaggcgcgcccttccacatccaccccgtgcacgagaaactcgccgcagtatgcggcgatctcatcgagaatatgcggattcagctccacatcggtaaacttctgccaccggtccgtcacaatatagtatgccccgtcttttctgcggcagcttaaatcgatcaccacatgttcttttccgactgcccgcttaagttccccgagcctatcccagcggatccttccgtccttaaatacataggatgtcacgatcacatggctcgcgccaagttcgatgtattcctccgcgttcgcggcgctgatgccgccgccgatctgcagcccgcccggatatgccccgagcgcggacaccgcctgctgccttgtcgcttcaaagtagtctgaggacgcagggttcagcagaatcacatgtcctcctgcaagcccgtcctttttatacagtccggcataatagtccgcatgccgcgcggcggagaaattctccaccgcacggtcgtctttatctgtcaggcttccgcccacgatctgttttactcttccattatgtatgtctatacatggtcgaaaacgcatcttttcctcctaataccggttgtcgaatattcttgtggatttcttctcactgcgcggaaggtctccgatggcaaccggcttcacattcgtagtgattccgatcttttctttgaattccttctggatcacctttgccgcctctttgagttccacgcctttgttcacttccacgaacagcgtgcacacgtctttgccgttcatatgatccagcatgaactgatactcgctggaggcctccttgacccctttgagcatatcttcgatctggctcgggaagatattcactccctttaccttcaccatatcgtccgtacgcccgataagcgtatcgatcctcgggtatttggaaccgcacgggcagctgcccgggataaatctcgtcagatcatgggtacggtagcggatgagcggcgccccctgcttgcgaagcgtcgtcacgacgagttctcctatctctccgtccggcacattctctcccgtcttcgggtccacgatctcaaaatatacatagtcgtcccagtaatgcatgccgcattcacagtcgcagctcatagcgatacccggaccgtacacttccgtgagcccgtatatgtcatagagcttaacgccaagttcgtcggcgatgcgctttctcatcttcgccccccaccgctcggagccgataacacctttcttcaggtatatcttgtctgtcatgtctctctttgcgatctcctccgccagaaggagcgcataggaggacgtagcgcacagaacagtggactgcaggtcgcgcatcatgcggagctgcttatccgtattgccgggacccatcgggaccgccatcgcgccgagcagttctgccccgagctgaaatccgatccccgccgtccacagcccgtaacccggcgtgatatgtatgcggtccagcgccgtgatgccggccatttcgtaacatctggcaaacattttcgcccagtcatctacatccttctgtgtatagggaatgataataggcgtccctgtcgtccccgaggaagaatggatcctgacgatctcctcatcgggcacagcctgaaggccgagcggatacgcttccctcagatctcccttccatgtaaacggaagtttttcaaagtcctcctgtgactgtatggactcgatatcgatcccgataagcttctctttgtaaaagcacggcttggaggtcagaagcctcaagttctcctttatgagcttgaactgtaattcagtcatctgcattattttttacatcctttctccggtcttccggctgtccatatatttttaacatgccgcctctgcgccgagggacaatgctttcatatttatatcaacaaactgcggccggatgtgtttcctgagctccgactctatgtccggcagtgtgatgtccagtgccccgctctttgcggccaccccgagaagcgctacgttgagcgcctttgccgaaccggcctcctcacacagtttttccccgtccacgatgcaaagctgcccggcatgttctttcagatattgaagcatcccgcctccatcatagtcattcccgctcaatgtggcagttaccggcttcaccgcctttttattgacgatcaccagtccgccattcctcagataaggcagatttctcactgcttccgcaggctcaaatgccaggatcacatccgcacttccgtgtggaatgagcggagagtggatctttttccccatgcgcacatggctcaccactgagccgcctctctgcgccattcctatcgtctcggtcgtccgtacatccagccctttattcatggccgcgtacgcgatcagtttggaggcgaggacaacgccctgtccgcctacgccgcaaagcaaacaattcttattcatcttaccccacctcctgaattgccccgaacttacacacctgggcacaaataccgcagccggaacaaagcgacggttctatggccgccttcccgtctgcgtttacaatggccggacagccaagctccctgatacactgtctgcacgacgtacaggcatcttctgccacccggtaaagagacgtgggttttgtgacggcaatacacggagacttgaagataaccgcacgcacgcccttttcgtctatcacttcctccacagcagcgacggcttcaccaagcttcagcggatccgccttcacaattttgcgcacgccgaccgcctccaggatcttcccgatatctgcttttgcaacggtctctcccatcatcgtcgttccggtgcccgggtggggctggtggcctgtcatggccgtggtggaattgtccaggacgacaagaacgatgtctgtctggttatatactgcgtttaccactccggtcatacctgaggcaaagaaagttgagtcgccgataaaggcaaagttcaccgcatccggctctatgatatgtaatccctgggcaatcgtcacatctgctcccatgcagagacacgtgtccaccatgtcaagcggctttgaattaccgagtgtgtaacagccgatatcaccggaaaacaccgcttttctcccgtgtgccgccttcttgaccgcatagaacgacgcgcggtgcgggcagcctgcgcacagaaccggcggccggacaggcagcggcggcatttctgcggcggcgtctgcgtttccggcccgcagttcttcatggtcaggcaggaaccggcgcagatcatcccgcacactttccacgctgttttctccggcattttttgtgtcatgggtaagtttcccttttatagtcaccggaagatgatatttgccggcaattctcaaaagttccttctcgatcaccgggtccagctcctcaatgacaagcacttcctcaagccctctcaggaactcctccgccagcgcctcaggaaacggatgcggtgttccgatcttcagaagcttcacatcctccggcagggattccttgacataggcataactgacaccgcctgctgccactgccttttttaaagtccccttcccctcggccgcattatatctgcaggaagagaaaagccgggacagttcttcattccgctcctctatcttcctgtggttctcataggacagacggggaaatatgacccagcgccccgtatcttttacaaatccttccggtacattttcgtccgcagcttcagccagctctaccgctgcacagccatggcagacgcgtgtcgtcggccgcagcagtaccggcgtgccgtactgctgcgaatacgcaaacgcgtctcccaccatctcatacgcctcctcaggagataccgggtcgaatacaggtatcttggcaaaggccgcgaagcacctcgtatcctgttccgtctgggaagatatcggtcccggatcatccgcggccacgatgaccataccgcctttcacccccacataagcaaggctcataagagggtcggacgccacattaagtcctacctgcttcatcgtgaccagcgtgcgcgcgcctgcataggccgcgccggctgccacttcaagggcagccttttcattgaccgaccattccacatgtatcctgcctccgctgttatgtttcgcaacggtctccagaatctccgtagacggcgttcccggataaccggatacaagatttacgccggcgcggatggccccgaggcctatcgcttcattacccatcagtaattctttcgccatatttatgtatctcctttgccgccctcaaacagaagggcatatcattatttatagttttagattatatcacaatttccaatggaaacaaaggcttttaccatcatgtaagttccggcggccgtttctccacagacgccagagaggcagacctgccgtctccggcggtccgcctccctgcgttatcatcatgatacagacattacttattgctgttctttgtcgtattgtcggttgtaccaccttttacatctttgtcgtttgcattcttgtctgtagcgttcttgtcacgattattgtcgccgtcaaggtcgtctgcgatatcgtccataccgtcttttacgtcgtcgccgatctcatctgcaacaccttcgtcgcgtgtgccgtctgtggcatcatttgtgttggtatcgttggcttcacctgtgttgtttcctgttgtcgtgttatttgtcgctccgttatccgcagcgtccttgtcacttccgcatgctgtcactcccatgatcacgcctgtgcacataagcaaaactaataattttttgaactgtttcatgttataatctccctttcatgtatattcatattaaatcaagtattacttgttgctagtaatatttgcagataatagaaatatatgcacgaggggcgatggcatatttttacattcgttccgcaatgcgtccgcttctgtatgccgcgagcagcacttccaggtccgcgatctgttctttcagttcttttcccacatccgtgtcgcctacgagcttgcgctgcaccactcgttttacgatcgtgctgtcggagtgtatatcgctttctttctcaatagccgcgtctgtggactcaaacggctcatgcgccgcaaggataaggccgtaagagttatagatcagcgtgtacccggcgatccctgtctctttttgatatgccctggagaatcctccgtctatgacgagcactttgccctggcatttcaccgggttctctccgtcctttgacttcacgggcacgtgtccgtttatgatgtgcgtgccctcaggaggcagaccaaactccgccaggatccggtttaccaccttctcatcctgaagcatggaataataaggattctttttctccctgtgcgtctctttgtccgcgagaaaataacgttcaaaagttgccattttatctttgccaaacagcggagaattttcatggagccagatgtaccacatgatatccttaccccgctccttttccttttcgtccagtgcatagaagccttttctgacatagctctccagcacttcatagagacttcttcccttgtaggaacgcccgaagagacggaccggcttcagcgcgccgtcctctttcagcggaacacagccgtggtacagcaggttattgttgtacaccttgtacaggcttcccttattcaatagaaaacgcatatgtctctgcagcttttcacagtgcagaaacgcctgttccagccgctccatgatgtcttcttcttccttcgtcagaacatatggatgcttcgggtcgacggtcgggaaattccggtccagaagttcatactccttaccgtctatctctattgttccccgctcatagtcaatatgatgcagaagattccggtcttccatcttaaagcccgggttcttttttatgatctggccttctactttaaactggataatggaaattgccttgtgcatcttgatatccatgagcatttcattcggattgtaattcggctcgcctttcagcttaaagcagccgcacgcgtcgtcctcgtacgtgttcagggcaaaggtagccagaggcagaagattgatcccatatccgtcctccagaatatccaggttgccgtatcttgcgcagatacggatcacgttggcaatacagcctctctggcccgccgcggctcccatccagagcacatcgtggttcccccactggatatcgaccgaatggtgctccatcagtttttccatgatgacatgcggccccggcccccggtcatagatatccccgacgatatgcagatgatccacggtaaggcgctggatcagctcactcatggcgacaataaacttctctgccctgcctgttctgatgatcgtgtttacgatcgcgttatagtaagattccttgtccgtcacttccgctttttctgtaatgagctcttcgatgacataggcgaaatcctgcggcagcgcttttctaacctttgagcgcgtgtacttgctggcggcccgcttgcacacctcgataagacggtacagtgtgatccggtaccagtcctccatattgctctcctctttcttcacccgttccatcttctccgccggataataaataagagtagcaaaagactgtttgtctctgctgctcattgtatttccgaaaacatcatcaattttacggcgcacggaaccagagccgtttttgagcacatgggaaaacgcctcgtactccccgtgaatatcggtgagaaagtgctccgtccccttcggcaggttcaggatcgcctgcagattgatgatctccgtcgacgcctttgcaatggtcggatataactccgaaagtctctcaagatacctctcctctaactctttcataactcctcccggggtctgacccctttcaaacaatatatttaccccttacgacaggattcccctgaaagggcctgaccccgtctgtccacttccggcagtctactgaaaggaatctgaccccgtccccacaaatttacagtacgatcacatccgacatgtcgtaccgccctgccggcttccctgccagatattttgcagcctccaccgccccttttccgaatatggctttggagtatgccgtatgcttgaactctactacctcgtcggcgcctgcaaaaatgatctcgtgctcgcccacgatcgttccgcccctcaccgctgagataccaagttccttcttgtccctcttttcgcgcacctgacttctgtcgtatacatatgtatatgcatcgtccatggcttcattgatggaatccgccagtgcgaccgccgtcccgctcggagcgtccagcttctgattgtgatgacgctccaccagctccacgtcaaagcccgcgcccgcaagcaccctggccgcgtcctttactagtttcagaagcagattgatcccaagagacatgttggcagaccggagtacggctgtcttctcagacgctttctccaccctctccagctgttcttcggacagccctgtcgtacagagcactaccggaagcttctgtttagcacagtaaccaagaagcgcgtccacagctgcggcattggaaaagtctatgaccacgtccgcctccacatcacatttatctatacattcaaatacaggatatgcattttcccttccggtgtatgcatcaattcccgcaacaatttcaatcccttcatcttcattgataagtcctgttatgacctgccccatcctgccgttgcagccgtgcattatcgctctgaccatttttcaaatctcctttcacccgtctgtacaaccaaaagtttcttatttataatacttataacattataaaaaaggatatcatatctgcaagacaaactcaacatatgatatccttttcacaaaacgtaactatctatattatactactttgattccgtaatccttcatcgcctgtgccagcgtcttctcatgttccggcgtaagctctgtgagcggcatacggaccggaccgcagtccattcccatgagcttcatagctctcttgaccgggatcggatttacctcacagaaaagctcgttcacaagcgggatcgccttgagctgcagcttcgcgctttcctttatatcgccgctgaaaaacttcccgcagatatcatgcgtctgctgcggcgcgatattggaaagcactgagataacacctattccgcccagcgacatgagcggtacgatctggtcgtcattgccggaatacagatcgatcctgccgtctgtcatagacatgatctttgcgatctgcgaaatatttccggacgcctctttaattcccacaatattctctgtctcttttaccaatgctgccactgtagccggctcgatattacatcccgtcctgctggcaacgctgtacataatgatcggtgttcccgacacagcctccgcaactgccttgtaatgcgctataagccctgcctgtgtagccttgttgtaataaggcgtcacaagaagcaggccgtccgccccataacaggctgcgtcttttgacatatctaccgctgtcctggtacaatttgaacctgtccccgcaatgaccggaatcctgccctttgtgcgctcgatcgcaaacttcacgcattccagatgctcttcctctgtcattgtggcagattccccggtagtaccacatataataatactatctgtaccattgttacagtgatagtcgatcaactcatccagtctatcataattgatgcttccgtcctcattaaacggtgtgacgatcgccactccggcacctttaaatatagccatattaaacctcctgaccttcaccaatatgtattatttagattcataaaaattttatcattaatacaattatatgtcaatgaaagtctcttgtcaggttcctgcacctctattcatccacacattctaatttgctgaccgacacttcgtacgcaatgcgcttctgagtctctgtctcagtaagctttttgacatattccctgctctggatccttccgttgatctgcacgtgctctcccacctcaaaagtagacgcgaatctggcatttctgccccagcagatgcacggtatgtaatctgatttgccgtatggcctgttcacggccagcagaaggtccgctatctctcttccaagcggcgtctttctgtacaccggcagcttgcatatgtaaccatccaggaagatgctgtttgtcttcgctccgtccagttcttcctctataaaagacacttctcttacgaatacggataacacgagcctgttcttttgttcatcgtgtctgttataagagcggaactggccgcttgccataataaattcccccgtatagtcctgggtcacgtcgatgagacgctcggaaatcatgagcgggatcctgtcctcggagttgctgaggcgttttacgagtacatccaccatgtagaatccttcgccgaacacttcatggctgaatgaaaagtctcctgccacctctcccataatagttacctggttgttttcaataatcttatctgacataattttacaatctcccttcctctgaatcgtatttcacggtcactatttagtctatgaagggagattctgatttagaactactttttaatattttgttgccataattccttttacgatactctcaaactgatggaacgggattccaactgccatgtccgagtcctcccatctgcagagcattcttgtgctcgggcagagcacgctgacgttcattttacctgtaatatacgggactgccgtcacctctgagcacatcccctgcattgctcccatgtcgatcttgggcttgattcccgaatcatattcatatccctggatcatacgcatcgcctggtacgcattgacgatcgcgataatgacgtccggctgcattgtacagtttacaaacgggcgtacaacgatgccatacgtcagcggctggtacgcgtgcagacttttgatactgttcctgagccttctcgccgccgcaggcgaatcgtacagattataagagaaatattctgtaccgctctcgatcctgtccgtacttttttccagtgcaagggcagttgttcccccgtcacatttatgattggcgaggcgggacttaaattccattcctcttgaagccttctggaccatgacgcagtacggcgctcctcctttgatctccgggacctcacaggcatcgtaatcttccttctcaaagaaaaactgtactcccacgagttgtttttttaaccccgccgcctcttttagatcgtcggtcagcgctttcatcttgtcccgctcatacgcatcctgcggaagtccatatgttaatttttcacttttaaacggcatcatcttttctcctgtcattttaaattaaatccaaaactgaaccggaacattccgatgtagataagaacagcggtcagtacgatatatacgagacacgtaccggctgcaaagagccagtccgcccgttctacctttgtctgcctgtaatagcttcttgcgcggcccgcgccgagtcctctgctctccatggcggcggccacacgttctcctcttctggccgcgctgcacagcagcggaagcatgatgcgaaacggcgtgctcagccggtttatcaggcctctgtcccactcgatcccccgtatctcctgcgccagcctgatactttcgatctcgctttgaagcgtcggaaggaaacggtaggcagccagcgccgcgtaaccatgtaccggggacaggcccatctgcagaatgagactcagcacgagatcgttcgggtctgttgtaaggacgaacagaagcgacataagcgagatagatatgatcctcatcccaagcgacaatatactgataagatcactgctgctccagtgaaatatccatatatgccaggcatctcctcctccgtcgattcctttcatgatgagcatgaacgccataaaggcaatgcctattccaagaaacacccgcattttcctcagtatgatccccggcgggatcttcccaccgatgcagccgaggagcagcgccatcagaaaggtacatagcggcagcaccggataaagggacaggctgatcagtatagtgacaataactatgagacatagctttataagcggattccttctgtgaaggaacgaatccctccattcatatgtgaacatgttcaagcctcctttacacaccggatcaagtaatctgtcatctgctttctgctgacgaaaagcgggacttcttccgcatatttgtgaagttcttccgaaaaccgccagacagacgggacctcaagctttcctttcctgaccgcgtccgcatcacggaagatatcttcaggcgcgccgcagaattctgtctgtccgtctgcgagcacgaccacctttttcgcgtagtcggccacaagcgtcatatcgtgagtgacgacgatgatcgtgaccccttcccggttcagttccagcatcagttccataagctccctctggttgtcgaaatcctgcccgtaagtaggttcatccagtatgaggactttctgtccggtgagcagcatggccgcaacgctcagtctgcgcttttgtccctggctcagaagaaaagggctcttgttcttctcggaactgaggtgaaatctctccagcatgccggcggcccgctttttcttttccatctcatccataccgttcttcttcaggctgaacatgagctcgtcaaaaacattgtttgtcacaaactggtcctccggattctgaaatacgagaccaaagtcacggtacaggcgctttttgtcacagcagtcaagctctctgccgtccgccttgacggaaccgccgtacggggagagcacccggaacaagactttgagaaaagtagacttgccggccccgttggcccccacgacagcgacgaactcctctcttccgatctcaacgtcgacactctttaataccttgtctgcctgtccgccgtatgcataggcgagactgttcgcctctaccacattctcccgcgcacgcgctgacacggcggcgctcctgtcagcaggcggaaacaccgccagttcccgcaaaagttctgcaaaccgtcttacgggcaatatgtcttcttccccgcatagaagctgctgtttttgaaagttcctcacttgcggaatatgatccagcgcgtttatccactctttcatgataaggtatttctccggcagaaaaatgttgaggccgcggtagttttcatcgtacacgagactccggatgacagaaggcgcgctgccttccagacatactttgttcccgccatccatcacgatcacatgacccgctttatcgagcagatgctccagattatgttctacaagtatgatcgttttgccgtatctgtccacaagctgcccaagaagcgaaaagacttccgacctgcttgccgcgtcgagattggccgtcggctcgtcgagtatgaggatctccggctgcatcgcaaggacagatgcaatggcgattttctgcttctgtcctcctgaaaggcttgtgagcagagtgctgcgcaatcctctcattccgaccatgccgagcgcctcatctatacggcggtccatctcctcctgcggcgtgttctcgttctccagcccgaaagcgatctcgtcctctactgtaaatgtacagaactgtgtctccggattctggaacaccatgcccatgtggcgtaccatgtctttcgtccttttcgtcaggatatcttcccctttaaaccagatatgtccttcggcttttccttcatagaagttgggaatgatcccgttgagcatatagagaagcgtactctttccgcagccgctcggcccgagcagcagattgaccgtaccttcctcgaaataacagtttaagccctgccatacggggagttcttccccgtcatagacaaagcttacattttccatttccactatttttttatgtaccatctgctccataccggctatacctgcgcgcatttaaaaccacgcagaaccccagtctttttaagccctgccgtaatgcccttcgtcagaatgatcccgatgactaccgcacttataagccttacgatcacaatacctgtaaacgtctttgcccctaacgtgagataaccgaaaacgacacagtctcttccgagcacacagagcgcgccgagcacagcgcccactgtcatatttgccatatttcccccgtaccgcttacagaccgcgtagccgatctccattccgactgcctgcagtgtgcctgcaaggataagctggatgccgtaagcgctgccgagcagcagattcacaaatgccgtgacgagcgcgccgaacagtgcaaatcccggcttgcgtactatatacatcggcagggacgccgacagcagatatatgccgaacgtcaattccataaacacaggcccaagcagagaggatagcggcatataaagataatccattatcgtgtatacgacacctatcactgctgcgaccattgctacgaccactacttcttttgttttccatttaagttccattttcttcctcctcttccatccctaatgtccgttttttactatatcatatcttttgaaagtatcaatatttttgcttattcataattttcatatatcatattgacatcatctataagcgattgagtacttgtaaattctgcaaaatgtggtaaactaataaagttgtatataataaataggtagaaatcgtacaggaaaagggaaatatttatgaaaacaaaacgagaagatatacgtaatatagccattatcgcccatgtcgaccacggaaaaacaactcttgtagatgagttgttaaagcaaagcggtgtgttccgtgaaaaccaggatgtagaggaacgtgtcatggattctaacgacatcgaacgggaacgggggatcaccatcctttccaaaaacacggccgtttactataaaggaacaaagatcaatatcatcgacacacccggacatgctgatttcgggggtgaggtagaacgtgtactgaagatggtaaacggtgtcgtccttgtagtggatgcatttgagggcgctatgcctcagacgaagtttgtgctcagaaaagcactggaactgaagctgccggtcatcgtatgtatcaacaagatcgaccgtcccgaggcgcgccccgaggaagtgatcgatgaagtgctggagctttttatcgacctggatgccgacgacgagcagctcgactgtccgtttgtctacgcctccgccaaagccggttacgcgcttgtggaactggacgacagcccgcagaatatgcttccgctgtttgagacgatacttgactacatccccgccccggaaggtgaccctgatgcagatacccaggtattgatcagcacgatcgattataacgaatacgtcgggcgtatcggcgtgggcaaggtagacaacggaacgatccgggtgaatcaggatatggtcgtcgtcaatgcccacgacccggagcggaaagataaggtacgcatcagcaagctgtatgaatttgacggacttaacaaggtggatgtaaaagaggcgaccatcggttcgatcgtggcgatctcagggatctccaacatatcgatcggagacacactctgctcacctgagaacccggaagcgatcctgtttcagaaaatatcggagccgaccatcgccatgcagtttatcgtaaacgacagtccgtttgcaggacaggaaggtaagtttgtaacttcccggcatctgagagacagactctacaaggaactgaacacggatgtcagtctccgtgtggaagagtctgacagcaccgacagctttaaggtatccggccggggagaactccatctgtccgtcctcattgagaacatgcgccgggaagggtatgaatttgcggtgagcaaggcggaggtcctgtataaaaaagacgaacacggcaagttattagaaccaatggaagctgcatatattgatgtaccggatgaatttaccggcgttgtcatcgaaaagctcggacagagaaaaggggagctgcgcggcatgggtacgtccaacggcgggtacacgcgcatggaattctccataccggcccgcggtctcatcggctaccgcggcgagttcctcaccgacacgaagggcaacggtatcctgaacacgtcatttgacggatacgcgccgtacaaaggtgacatccagtacaggaaacagggctctctcatcgcgtttgagacaggagagtcagtcacttacggcctgttcagcgctcaggaacggggaacgctttttatcggacccggcgaaaaggtatattccggcatggtgatcggacagaacggcaaggcggaagacattgagctgaacgtctgcaaaatgaaacatctgaccaacacccgctcttcaggggcagacgaagcgctccgcctgacgtcaccaaaggtgctgagcctggaggaagccctcgactttatcgatacggatgagcttctggaggtaactcctgaaaatctcaggatccgcaagaaaatattagatccgaaaatgagaaaaagaggaataaaataatggcttttttatcgctgctggaaggaatccgcacacccttccttgacagactgatgcagtttatcacttattttggacaggaaattgttatcatagcggttatctgcgccctttactggtgcgcggataagcgctttgcttatatgctcggctttacctattttaccgccggcctgctcgtacagagcctgaagatcaccttccgcgtcccaaggccctgggtgatcgacccttcttttaaagccgtcgaaagcgccgtccccggcgccacaggctattcctttccaagtggacacacacagggcgctgcctgcctgttctttccacttgcgctcaggactaagaacacgtggcggaagcttttatgtgttctcgcctttatactgatcggcttctccagaatgtacctgggcgtccacacaccgaaggatgtgatcgtatccatgctcctctctgtcgccgtctcctgtatgatctggcattttcagcggttttttctggacagtacgcagtacgtgaaacagaccgccgctgtgctggccgccctgtccctcgccgtggcagcctatgccctcctccttaaaagccgcggcaccatcgacatggaatatgccctggactgctgtaaagccgcaggcgccggactcggattttcgctcggctattatattgaacggacacggcttgatttcgacacacacaccggccaattcggcagccaggcggtaaaactcattgcaggccttggccttacactcttaataaaagaaggctttcctctcatattcggagcatccattaccgccaaaatggccgaatattttgtgctcgttttgtgggtgctcgtcctctacccgtgtatcttcacccggttgaaaaggcggcattcataatcccattttttaggtcttggcaaaatcccggggataatttatacttgtaatgtacgcagacggttccggccgcaaggtctgaaacgatatgcccgtacatacgatgaaaaccgacctgaagggggaactatatgaagcactatgtcgctaaatttttaaaacgactggcggtaacacttgaatttttcatatcgctcatgctggcgcttgggatcatcctgctctgcctgcgcatggcagtctcgatgatccacattccaaatctggacgtgtggcctaactacaacgatctgcttgaaacatgctttaatctcatcatcggggtcgagctcataagaatgatgtattaccacacgccgaacacagtatttgaagtgctgctgttcgcaatagcacgacagatcatcatagaccactcttctgtctggagcagtcttatcggagtctgcgccattgcggtgctgtttgccacacgcaagtacctgttctgtgagttcgacgtggctgacgagatcatcttccgcgcaagcacgcgggtgaaaacagtgaacaagattctcggcatcagtatacctcatgaacagaatgaaactctgctcagcgtcatcgaacagaagtttcaggaatataagatcgagacaggcgtgggcgcctgtgtatacttttctgacttcggcctgagagtcgcaaagatgcatgaaggaaaaatttcgagaattgaggtaatacgttctatacattagtgtccaaacatgttatactacatatatcagatagattattagttaaagaccgaattgtcagactatagacatctgaaattatgtcgaaaaggagttggacagcatgaagtttattattagcggaaagaacatcgatgtaacacctggcttaagggagaccgtggagcacaaattggggaaattagagaagtattttacttccgatacggagatcatcgttaccttaagtgtggaaaaagaacgtcagaagattgaggtaacgatccctgtgaaaggaaatatcatccgttctgaacaggtaagcagtgacatgtatgtctctattgatctagtggaggaggttattgaacgccagcttcgcaaatataaaaacaaattggtcgcaagacatcaggaaggcggcaacttccgccaggaatttttcgagagtgaatatgctacagaagatgatgatgaagtgaagatcgttcgtaccaaacgtttcggcatcaaaccaatgtacccggaagacgcatgcatacagatggatctgctcggccatgactttttcgttttctgcaatgcagataccgatgaagtaaatgtagtctacagaaggaaaaacggaaccttcggcctcattgagccggagttccagtaaaatataagaacagagcgtcaccagtgaaatgtatgtgatacaaagagagggcggacaggtttaaaacctgtccgccctctctttgtacttctatccttccagcactgccggctgtccgccaatctgtgcaaaccagcagctctctcctgcttccagcgatgcctgcccgtttgtcccttccgtgatctctgaacatacagcttcaagttcttccccggggacaagtacctggatttctactttgtccgtatattcagattccaggatcttaagcccattctgcccgagaatatactgtattttaccgagaccggtataatctgttgcgatcttaagtttaaccccccgaattttggttataattacagaagaggccaggccttccttcacagcctgtgagtatgcgcgcacaagcccgcctgttccaagaagcgttcctccgaagtaacgggtcactactacagcagtgttgcagagcgcctcccctttcagtacgtcgagcatcggctttccggcagttccccccggttctccgtcgtcactgtaccgggcaagctcagacctctctccgatcacatacgcaaagcagttatgactggcattccaatgcttctttcttatcgtttcaataaaagccagcgcttcttcttccgtggagacgggcctgacagaagcgataaaacgggacttcttctccacgacctccccctctccgccttcgtaaactgtcctgtactctttcgtcatactttgcacctttctttcatattacatactggttcaactaatactatagcgaatttcttaagtttttcctactgaaatatgaagttttcatttttttctttatttcaattactatatttgctataatgacttggtatgaaggaggcagacattcatgaattatggtaaaaagaaagcttcgcagaagcaaaaaaaaataacgtccaaatcaaccatgcagggaaaaagagttggtgtaagactttttaaagcatttctgctctgcctgcttgttgtggcagtcgtcggcgtcatcggcggcggactgttcctgaagaaaatattagacaacactccggacgtatccccggctgatgtacagccaaaaggctttacgaccatggtatatgccgacgacaataagacggagatcgaacgttttgtcgcttcgggtgccaaccgtatatataagaaaatagacgaagtgccgaaggatctgcagcatgcctttgtagcgatcgaggacgagcgtttctacaaccacaacggaatcgacctccagggtatcgccagagccgcagtggtcggcctgacgagcggcaacttctcagaaggcgccagcaccatcacccagcagctgatcaaaaacaatgtcttccccaacttcacggaagagaaaaccttctttgacaagctggaacgtaaagttcaggaacagtatctcgcagtggccattgaaaaacaaatggacaaagatacgatcctggaaagctatatgaacacgatcaacctcggccagaactgtctcggagtacagtccgcggccaagagatattttaacaaggatgtgtctgaactgacgctgtccgaaagcgcagtgatcgcaggcatcacgcagaatccgtcggattacaatccgatcaccaatccggaactgaacgcaaaacggcgggataaagtgttaaaaaatatgctggatcaaggatatatcgaccaggccgcgtacgacgaggcaaaggcagacgatgtttattcccgtattcagacggtaaacaactctgagactgacgacacgccttacagctactttgtggatgcgctcgcggatcaggttacacaggatctgatagaccagctcggctatacggagacgcaggcatacaatgcagtctacagcggcggcctgagcatctactccacacagaatctggatatgcagaaaatctgtgacgaagagatgaacaacgattccaactatccggggctgaaagaatacggtctcgattacgccctcactgttacacgggcggacggaacggtggagaactacagttccggacatatcaaacagtatgtaaaagaaacgtacggcaaagaacaggggcttctctactccagcgaggatgaagcgcgcgccatggtggaagaatggaaagcgaccatcgccaaggagggcgacacatacgacgagtatatcaatatttcccctcagccgcaggcatcagtgaccgtcatggaccagtacacaggacagatcaaagccatggtaggcggacggggcgccaaaacaacgagccgaagcctgaaccgtgcgtataaaggctccccaaggcagcccggttccacattcaagatacttgccggctacgcgcctgcactcgattccgcaggacagacgctggccacgatcataaaagacgaaccatatacgtaccgcgacggtacgcctctgaaaaatgccagcgcaacacaccgcggcgacatcacaatgagggaagcgatacaatggtccgtcaacgtatgtgcggttaagacgatagaagcgataactccaaagcttggatatgaatactgtacagaaaaattcggcatcacttcgctggacccgcagaacgatgtatatgatactctcgttctcggcggtctgagcaaaggtgtgtataactaccagctctgtgctgcctatgcatcgatcgccaacggcggcgtatacaatacgcctaccttatacacaaagatacttgaccacgacggtaatgtgcttctggaaggcgccggcgaatcacacacggccctcaaggacagcacggccgctcttctcacaagcgcgatggaaacggttgtagagagcggtaccggtaccgcctgccggctcgacaacatgccggtggccggtaagacaggtacgacagactccaacaaggacctctggttctgcggttttacaccatactacacttgtgccgtatggggcgggtatgacgacggaaaagtaaacggctatgacttgaatttccgtttccgtatatggcgcggcattatgagccggatccatgccaacctggaatacaaagactttgaaatgccaaattccatcgagaagaagacggtatgtaccagaacaggaaagcttgcggcgccgggctgcccgacgataacagaatatttcgcgaaggataccgcgccgacagagtcttgtccgggccatgtagatacaacaccgaaggaagacgacaccgacgatgaggatacaactgataatccggatgcaaacacgcagacaccgacagatccgaatcagggcggcgggactcaggagccgactcctacaccaacgccaacaccggatccggagcccactccgccggtagatccgccggtagatccaaacccgccggtggtagatccgtcgacgccctcaacgccttgacgtctgtttccaagaatacagcataacaaataaaatatatgtaaaaagataaaagcatctgaaaaaatatcagatgcttttattttatcttataccgcacatttcctatccgattatcagcttcgccgccccgcagatccccgcatcgttgccgagctctgcaagtacgaacttcgtttccttattcgcaaaaaatgcccgttccttgaaatgcttttccacatattccagcaggatatctcccgcttttgatacaccgcctccgatcacgatcactgcgggatcggtgatcgcagccatatttgccatggcatgtccgaggtacgtgccgaattcctccacgatctcctccgcagccttgtccccttccttcaaagcgtcgaagacagctttggcactcagtttttctttcttcagcaccgtatcatcactgttcttttccagacgccgtctcgcaagtctcgtgatgcctgtagccgacgtgtactgttcaagacagcctctgctgccgcagccgcacgtctcatcttcttcgtaattcacacagatatggcctatctctccgccggcgccgtgctctcctacgataggacagccgttgacgatgacgcctcctcctacgcctgtaccgagggtgaccatgatcatattcttctgccccttgcctgccccgagccacatctccccgagggccgcaacattggcatcatttcctgccttaaccttcagcccggtaagttctcccatctcccgctttacttctttatagccccagcctagatttgccgtattctgaacgataccacggtcgtctaccggtgcaggtattccgatcccgattcctgcgatctgcagatgccctatctctttttcttccatcttagacttcaaggatgcggcaacatcaggaaggatcgcttcgccgcggttttctgtcctggtctttatctcccacttctccacaagggtgccctctgtcctgaaaagccccatcttaaccgtagttcctccgatatctacgccaaaacaatactgcattctttaaacccctcctatttctttgtaagattctgctgtacccgcttataaagctcatgagccgcattgtagcccatctttttctgcctgtggttgatagcggccgtctctacgataatggcaagattacggcccggccgtatcgggagctgatggcatacgactttgttgccaagaaattctgtatactcctcttccatgccgagacggtcatattccttctctttattccagtcttccagcgtgatcaccagatcgatattctgtgtctcacggacgctctgaacaccgaacagcgtctttacatctacgatcccgatcccccgcagttcaataaaatgcctggtgatatccggcgccgtcccgaccagtgtctcgtcgctgaccttatggatctccaccacatcgtcgctgaccaggcggtgtcctctcttgatgagctcaagcgcggattcgctctttccgataccgctctcccccatgatcagtacgccgacgccgtacacgtccacaagtacgccgtggatggaaatgcagggagccagctccacattcagccagcggatgatctctgctgtaaattcagatgtctttttttccgtcgaaaatatcggtacctgcgccgcatttgccttctccagaagccgctgctcaggcacaagatcgcggctgaagatgatgcacggtatctgataagacagcagtgtatcgtagatatgttcctttgtctcctcatccagagtttccagaaatgtatattccacatagccgattatctgtacgcggtcagaatcaaagtgttcaaaaaaaccggtcagctgaagcgcgggccggttgatatccggtacctccacctctctttctgtcagatcaacatccggcgtcagattccggagattcatcttttcgacaatctttttcatctttactttcttccccatggcagtctccttttcctttcagtcttcctgctccctgaaatgcacctgcatcacaaggtcctgcatttattatatcatatcagtgaaaaaaattgtacacgtcacgggccgatttttcattcatggacggcagtctccccagttcctccaccgtggcattcttaatggcatccaaattggaaaaatggctcatcaagtcttttctcctagccgggccaacgcctggtatgtcatccaggacagaatgcacctgcccctggcttctcagctttctgtggaatgtgatggcaaaccggtgggcctcatcctggatccttgttatgagcttaaatccctcagaatctttttcgatcggaatttcctcattttgataaaacaaccctctcgtccggtgattgtcatcttttaccatgccgcacacagggatattgagcctcagcctgtccagtacctggacagctacattgacctgtcccttacctccatccatgagaatcagatccgggaatgcggtaaagcttcccatgtcttttccttcctccatctctttcatcccgtggacgaatctccgcgtgagcacttcctccatgctggcatagtcgtcagcgccctgcacgcccttgatcttaaacttccggtagtcattgcgctttggctttcctttttcatatacgatcatggaaccgacagaagcgaatccgttcgtgttggaaatatcgtacgcctccatccggacgattcccttcagaccaagtaatttctccagttccttcaccgcgcctatcgtacgtccctcttcccgtttcagccgttctttgtccgtgctgagtacgagggccgcattcttctgcgccagctctaccagcttttcctttgcccccttcttaggtacgcgcagatggaccttatgccctcttctacgcgtgagccactcttccacaacttccagatcctctatctcttcctgcagcatgagctgggaaggaatgtacggtgtgccggcatagaactgcttgataaagctggagaggatctctgcttcgctctctccctttgtgatcctaagataaaaatgatcccggccgatgaggcgcccgccccggataaagaatacctgtacgaccgcgtcctcttcctctgtggccaccgccagaatatccctgtcatccccggcagtgtcggttatcttctgcttctgggcgatcttctggacactgtttagaagttcccggtattcaatggctttctcaaattccatcgcctcggaggcgcactgcatcttctcctccagctccttcaggatgagatcataattaccgttcagaaatcggaggacttcatcgatggacttccggtagtcctcctgtgatatatacccctggcacggcgccttgcactgatggatatggtaattcagacaggggcgttctctgccaatatcccggggcagcttccggctgcagctgcggatattataaagcttgcgtataagctcgatcgtatctttcactgcccccgcgctcgtatagggaccgaaatatttcgccttgtcttttaccatctttctggcaagcatgatcctcggaaacggctcatccaccgtaaccttaataaacggataactcttgtcatccataagcatcgtattgtatttaggacggtgttcttttatgaggttgcactccagcacgagcgcctcaagctcagaatccgtcacaatatattcaaatcttgctatatgggtgaccatctggtctatcttgacgcctttgctgcggctcatctgaaaatactggcgtaccctgtttttcaggctgatggccttccccacatagataatatcatccttctcgtcgtgcatgatatagacccccggcttaccgggcagtttcttgagttcctcctgaatatcaaacatacatctgctgtctccttgtctgtcatcctatagcatttacaaatgcggctttcactgaatattcctgattcaatagatctacatcatcataccatattacggacgaaaagttaaatagccggctacatttttaaagcaaaagcttcatatggtttcagcattatatttttatctatgctatctctgttgtaattgctgataagcacttctgcatcggcctctttaaattctgccggcagtgtaaacggcaccgcatcctctgtaaaactgcataccacgagcagtttatgcccttccgacgttctcgtatatacgtacaattcttcgctgtccggcaggagaagttcataagtcccggacacaatgatctcctctttcctgcgcagacgaataagcttctgataataccggaacacagaatcctcccttgacagttgctcttctgcgttgatctctttatagtttgggttcaccatgatccacggagtaccggcgctgaaccctgcgttcaccccgtcatcccactgcatgggcgtccgggcattgtcccgccccttgtatctgatatacctcatcatcgcagacgcatcgacgataccactttgtacgaattcatgatatgcattgatactctctatgtctctgaaatcttcaagagtttcaaacggcgcgttggtcatgccaagttcctccccctgatatatatacggcgttccctgcatcatatgcaggcaggtggcgagcattttggcggacaattcccggtatgcagggcggtcatctccgaacctggagacgattctcggctgatcatggttacaccagtagagactgttccacgccttttggtaaagttctgtctgccatttcgacatcacagctttcagctgcgggagtgagactttccggtcgctccacttataaccttccccctcgtcaagccccatatgctcgaactgaaataccatattgagctcttttccgtccagcgacgcatatttctgcgcttcctccaccgtaacgccggcacactctcccaccgtcatcagatcgtaatgggacaataccctgcggttcatttcctgcaggtattcatggacgtgaggtccgttctgcgcgtgaggcgaagggtctccatagagctgtgactctcccttcggcccgtccggaagaccttcagcctttgatatcatactgatgacgtccatccggaagccgtcgattcctttccggcaccaccagtccatcatctcatacaccttatcacgcacttcaggattatcccagttcagatcaggctgctttgaagaaaacagatgcaggtagtacatatgtgtggactcgtcgtagctccaggccggaccgctgaagcaggatccccagttgttcggctctttcccgtcctttccctccctccagatataataatcccgaaaggggttgtgttttgatcttctgctttccacaaaccatctgtgttcgtccgatgtgtggtttacaacgagatccatcacaatacggatgcctctttcatgcgcttctgacagcatccgctcaaaatcctccattgtgccgaattcctgcatgatcgcctgatagtcgcttatgtcataaccattgtcatcattcggcgactcataaacgggcgacagccagatcacatcgatccccagttctttcagataatccagctttgccgtgatcccgttgatatccccgattccgtcaccgtcagaatcattgaagcttcttgggtatatctgataaacaacactttgtttccaccatgtcttttccataatttttcactcctcttaaaattttgattgacgttttgcgcaaaacctaccatacttgaattataagcagtggatctgtgaactttcaacacgttttgcgcaaaacgtaactatgtacaaatatagattgttacttttatctattctttacatttttacttccgatcaacgaaaggagctctcatatgacagtacgtatcaaagatatcgccagggaggccaacgtaagccctaccaccgtgtccaacgtcatacacggcaatacaaaaaaggtgtctcccgcaacgcttgagcggatcgaggcgatcctgcacaaaagacagtatataccgagtatgggggccaggatgctggccggaaactcttcgcacctgatcggagtattgatcggcagtaagagaagacaggaacgtggcatcgaccgcgacccgtttacgagtattcttcttgaaacactggagacagaaatattccgccagggctattacatgctttttcatatttcagacaggccggaggaaaactgggcgcttgccgctacctggaacatcgaaggactgatcaccatcgggctgagtccggaagaaaatgaaggaatcagggaaaaatgcggcattccccttgtgaccgtggatgtctattatgatatcccgggaatggcaaatatcggccttaaggatgaagaaggcggatatctgatggcgcagtttctgtttgatcatggacacacggacttcctttttcttgcagacaacgacactggagtagatcatatgcggtgggagggaatcgtgacgtatctgaaagagcagggaagctctgaaggagctctccgagagcgtcacctcctcatcccttccgacattgccggaaggcaggcctattatcagaaaaagctccctctgtttctggagaaacaggcgctttttttcgcctctgattattacgccgcagaagcggtacagtatctcagacagaataacatatgcataccggagcagatctccatcgcaggatttgacgataacgtatacgcttctatgtgttcaccgccgctcaccacgatccggcagaatgttccccaaaaagcagccgccgcagtacgcaagctggccgctctcataagaggggagacaggtatccagctggaggaacggtttccggtagagttgatcatacgggattctgtcgctcttagaagatgaccaaaaaaggagccggggcccttcctgcagaggtcttatctttgccggaaggggcccggcccctttgatcattcttctgtttcttcttttacagcttcgtttgattccatatttgaatcaattgccgcttcactcttttgctcgatctgcggctctgcttctttgacggtgaccctttctccctgtttcttctcagtctcaggatcgataccctctgcctcatggaagatttccataaattctttgcctgtgatcgtctccttttcgatgaggaaggctgctatcttatccagtgactgtctgtgttcactcagcagtcttctggcctcgctgtaagcatttttcaacatttccatgacttccctgtcgatctcagcggatgtcgcttcaccacagtttctaacggccctgccgtccagataacggttctgaatggattccagtccgatcagtccgaacttctcactcatgccgtactgtgttatcatggctcttgctatgtttgtcgccttctcaatatcattggcggcccctgtcgtcacagtgtcaaatacgatctcttccgccgcacggcctgccagcatgccgacgagcatcgcctcaagctctttcttcgtattgaggaacttctcttcctccggcgtctgcattacatatccgagcgcgcccatggttctcggcacgatcgtgatcttctgcacaggctctgcatctttctgcagtgcactgacaagtgcatggccgacttcatggtaggacacgatcttgcgttcctctgtactcatgatacggtctttcttctcttttcctaccagtacgacttccaccgcttcaaacaggtcaccctgcgtaaccgcacttcttccgttcttgaccgcgttgatcgcagcctcattgatcatgttggccagatcagagccgacagccccggatgtagccagagcgatcgcctccagatcgacggtctcatccattctcacgtctttggaatgcacttttaatacgtccacacggcctttcaggtccggcttctcaacaatgatacggcggtcgaaccgtcccgggcgcagcagcgccgggtcaagtatctcaggcctgttggtagctgccagaagcacgagcccattgttcatatcaaatccgtccatctccgacaggagctggttcagcgtctgctcccgctcgtcattgctgccgagctgattgtcacggctcttgccgatcgcgtcgatctcatcgataaagatgatacacggcgccatctgctgcgcctgcttgaacagatcgcgcactctcgacgcgccgacaccgacatacatttccacaaaagaggaaccggtcagggagaaaaacggcacctttgcctctccggcgacagcttttgcaagcagcgtctttcctgtacccgggggaccgacaagcagcgcgccctttggcagctttgcgcctatctgtgtatatttacccggattgtgcagaaaatcaacaacttcctgcagtgattccttagcctcgtcctgtccggctacgtctttgaaggtgatccccgtctccttctccacatacatcttggcattgctttttccaatgcccatcattccgccgccctttgacatccgctttgtcatccagacaaacatgcctacgatgagcgctatcggaagcagcgtcagaagtacgttcagtatgacggcagatgtcgtgtccggtatctcctggccaaacttcactccagccttgtcaagccgcccggccagtgtgtcatcccgcacaacaccggtgtaatactgcttggctgtccgcgcgccgtgctctttcttcattgttatggtgattctgtcactgctgatgatgacttcttccacctttttatcgtccacgtatttcaggaactggtcataactgatttcctgggatcctgcggaaccctggaactgatacagagccagcaccaatatggcggtgattaatgttactaaaataatgaaggaaaaaccctgtctgttattcttattgttgggcccttgattatttttgttctgattattctggttgtccatttttatcctcctgtatcacccttttattatacggacagcctacttagaaatcaataaaaacattatgaaaagattgtaaacttcctatatcttgtagtatacttggaatgagattgcttatactgaagtttatagctaatttataggaattaagagggaatttacgaatgaaaaaaggatttgacaatgaaaaatacttgaaaatgcagtcagcccatatccgggaacgcatcgaccagtttgacaacaaactgtatctggaattcggggggaaacttttcgatgattttcacgcttcccgcgttcttccgggatttcagcctgacagtaagctgcgcatgctgaagcagctttcggaccaggcggagatcatcatcgtaatcagcgctgaggacattgagaagaataaagtccgcggcgaccttggcatcacttatgattccgacgtgctccggcttatgcacgcttaccgtgaaaacggtctctatgtgggcagtgttgtcattacaaagtacagcggccaaagcagcgccgatttatttaaaaacaggcttgagaagcttggcatcagggtctaccggcactatgtgattcccggctacccttccaatgtaccgttcattgtcagcgatgaaggttacggaaagaatgattatatagagacaacgagaccgctcgtcgttgtcacagcccccggtccgggcagcggaaagatggcagtgtgcctgtcccagctctatctggagcacaagaggggcatctgtgccggatacgccaaattcgagacgtttcccatctggaatataccgctgaagcacccggtcaatctggcatatgaggccgccacggctgatctcaacgacgtcaatatgatagatccctttcatctggaagcctacggcaggacaacggtcaactacaaccgcgatgtagagatattcccggtgctgaatgccatgtttgaacgcatttacgggaaaagtccttataagtcgccgaccgacatgggggtcaatatggccggcaactgtatctgcgatgacgaagcgtgcagagaagcttcctgccaggagatcatccgccgttattacgactctctgcggcggcttctcgtgggcgcatgcccggatgaagaggcatacaagatcgagatgcttatgaatcaggcgggcatcacggtccacgaccggcctgtcgtggacgccgcgctgtcgcgcgccgaggagacaggagggccggcggcggcgcttcagctgcacgacggccgcatgatcacaggcaagacgtcaaatcttttaggcgcctctgccgcgcttctgctcaatgcgctgaaagaactggcgggcattgaccacgagctgcacgtgatctccccggatgccattgagccgatccaaaagctgaagacacagtatctcggcagccggaatccccgccttcacacagacgaagtgctcatcgccctctccgtcagcgcggcagacgatgcgatggcccagctggcgcttgatcagataccgaagttaaaaggctgtcaggcgcacacgtccgttatggtaggctccgtggatatgaagcagtttaagaaattatccatccaggccacattcgaggcaaaatttgaaaaaagttctgtattttttaatggaaaaggtatataatatacgggtattttttttaccaacattacatagcctaagctaaagatatcaattgcgataagattagcttaggctaaaacattttatacaaggaggaatatatggcagtaaaatacgtattcgtaacaggcggagtagtatccggacttggcaagggaatcacggcggcctctcttggacggctgctcaaagcccgcggctatacagtgaccatgcagaaatttgacccttatatcaacattgacccgggcacgatgaacccggtgcagcacggagaagtgtttgtgacagacgacggcgcggagaccgaccttgatctgggacattatgaaagatttatcgatgaaagtctgagcaagaattccaatgtcacgaccggcaaaatatactggtctgtactgcagaaggagcgccgcggtgattttggcggcgggaccgtgcaggtgatccctcatatcaccaatgagatcaaaggacgtttctaccgcagcccggccgcagagaatacggaaatcgccataatagaagtgggcgggactgtcggtgacattgaaagccagccttttcttgaggctatccgccagttccggcacgaaaaagggcgggaaaatgtgatactgatccacgttactctcattccgtacctgcgcgcctcacaggagatgaagacaaaaccgacgcaggcgagcgtcaaagacctgcagggtatgggcatccagcccgatatcatcgtctgccgctccgagtacgcgctggacgccggtataaaggacaagatcgcgctcttctgcaatgtgccggccaaccatgtgctccagaacctggacgtcgattatctctacgaggccccgctcgccatggaaaaagaaaagctcgccgatgtagtatgcgaatgcctgaaccttccgtgccccaagccggacttaaaagactgggaggagatggtggactacctgtgccacccgaacaccgaagtaactgtggcgctcgtcggaaagtatatccagctccacgacgcctacatcagtgtcgtcgaggcgctcaagcacggcggcatcttcagccgtgccacggtaaatatcaaatggatcgactccgaatctgtcagcgcggacaatgcggacgagctctttcaggacgtcagcggtatcctcgttccgggaggcttcggccaccggggcatagacggcaagcttgaagccatccgatacgcccgcacacacaaggtgccttttctcggactctgcctcggtatgcagctctccatcgtagaattcgcccgtgatgtgctcggatataacgatgcccacagcgcggagctccggccggatacgacacatccggtcatccacatcatgcccgaccagatcggtgtggaagatatcggcggaacactgcggctcggctcctacccatgcgtgctggacaagcattccaaggcatacgaattatatggaaaagaaaagatcaacgaacgccaccgccaccgctacgaggtgaacaacgattacagggaagaactcaccgcccacggcatgaagctgtccggcctctccccggacggcaccatcgtagaaatgatagaaataccggagcatccctggttcatcgcgacccaggcacacccggagttaaaatcaaggccgaacaggccgcacccgctcttcaaaggcttcatcgaggcagcgctgaattatcagacaaatcattaaattgaaaggggtcagacccctgccatggcaggggtctgacccctttcaattcaacgaattgtcagacacattgtgacgaatacgatgccgagcaggacgctgcagcaccatatgctctgtatgccccacagaaatgccaggactgtccccgctacggcgcccagtatgaacagcaggatgatcccaaagtaatgggccgcctgtattccggccttcgtttctttgtttatgacgtactggaacaacttctctgtccccgacctcaggtttccggtacacatggtcgaggcgtaaggcaggtttttcatcttccggaagctgttcacctgcagggagcagacgaacgagatggtgacgttcacgacactgtccggcacagaggccggtacaaacccaacaactgacaataatataatttctattgctatgatccagcgctcataaatattaaattctttctctgtaaaatactttttaaacacctctgttataaatacaccgagggcgaatgccaatatggggatgatgcagtatcccgcctggcggtatcttccctgtgcggcatatacgccgagcaggaccatattgccggtctgcgcgttggcaaacacgcctcctctcagtatataggtatatgcgtccaggaatcctcctacaacggcaagcagagctgctatcctgaatgtttcgtgtatgggcaccgccgccgtgcccggctgttttcctttcatcgtctactctcctgtctctcagtcaaaagaccagcgtacgctgctgcctttttccgtctttgtcactatgagcttgttgtcgatctgctctttcagctcatttacatgcgaaatgatcccgacgagcctgctgtctccagccagctcattcagcacctttatcgcctgctctcttgacccgtcatccagtgaaccaaatccctcgtccacgaacatcgtatcgagatggaccgcgcctgctgtattctgtacaatatccgccagtccaagcgccatggacagcgacgccatgaaggattctccacccgacagcgtcttcacatcgcgcaccgtaccgctgagcaggtgcaggacatccaggtcaagtccggcctgtccctggcttccaagactttttacatctctgcactgcaaaatgaattcgttgttagtcatctgtacgagcctcttgttggcggcctggatgatctgtttgaaatactgccgctgcacatatgtctcaaaatcaagtttgacggctccgcttaaattgccgttggccgtacggctcagatttcctacaagttcatactgccgctgcaggcctccctttttctcaaattctttccgcagttcctctctgatctctctgttcttgctgttcatccctccaagccggatctgtccgcctcttatatccctgatcttccggctgagttcttccgcctccagcttaagcgcctccacatccacgcgctctttcccctcgatctgggagccgagcagcttaagcgccgcttcattgtctctgacctgcgcccggtactgctccagggcagattccatctcctttgccgactccagaagcggctttttcgcttcgtactctttggcggacgcaaatgcttcctgagcgagcgcctctctgaagccttcctccgctttccggcgctgcacatccagctgtctgccgcgcttttcctcgccgcttcgctccccttccgtccttctctgatcctgcagcgcacgctcgtatccctcccgggctttggcgcagcgctctctcagttcttcaagcagcccgtatacttcattgcggcgcttttcggcctcgtcctttgaacggtactccagcttgttcttcttttcctctgcaagcgcattctggcggctgtactcacgctcaagctcctgcagcttctgccgggattcctttaacgcgttatttttaagcgaaagttcctgctcctgcttctcgtattcttcctgtaccgcggcataccgtttgacattcttctgcgcgcggcagagcgcctgcttcgtatcttccgcctcacggcggcacgagccggcctccctccttatctctgcctcagcttctgccggatctgtccccgcgcccggaccaagtatctttctgcactctctttcaaatacttctctttccgtccgaagtcttcctgccgcctctccaagcgcctgggccgcactttcacgtacgagctctgcctgattcctgcgctcctttgccgcttccacctcttcctgtgacggtgcatcatccgacagatgtgccggcgccggatgcccgcatgaaccgcacacaggacagggctttccttcctccagcactccggccaggacgccggcctgctcatccagaaatgcccggtacttctgctcatagaccgccgacgcttccacataggcggccgagcattccgcctcattttgctgtttctccctgcatgccgtctcaaatgcccggatatgctgcgccgactgctccagcgcttccagcgcagacgctctgtccgtcagaataccggcttttgcagacagccggtccctctctgcctgactgccggccagttcttcctgctccttcctaagtcccctgacgtacacttccaggcggtccgcctttgcagcagttttctcacactcgtctctcattttgcaaagcagcgcagacagccggtctctctcttcttcctgctccttcaatgcatcatactggcgcagagcgtctccgagacgaacgagcgtctccgtatactcaggctccttccgactgagttcttcccgcgcagcctcctccgcagcgtaagcctcacgggcggctgccgcggattccttttctttcctttccagtctgaggaggctctgtcctgactcctctgccgccgcccttatcgtttcaaactctgcctcttttgcgcgtacccgctccactctgcgggcacacgcaatgccggcctctgtctcccggaaggcccccttcctttcccgcagccgcatccccgtttcacacgcctcttcatatgcctgaaacagacggttcaccgtctccccttctttcatggcgccgtggagttcatccagccgcccctgcagccggtccgcctccgcccttcggcgcttttccttctccccgccttcttttatgataaggccgagcagccgcagcgtctcttcccggtccgggatcggaagtcccttaagcgcgctccactctgtctcatatgcactgtccgcctcacattccgcccgcccgatctcccggcgcacacttttgacattgtcttccagttcaatgtacagacttgtcgactgccgtttcagctcctcctgtacgcggtaataaaacctcgtgtgaaatatcctggagaatattttcttccgctcccgcgactgtgcatgcagcagttttagaaaatctccctgtgctatcatggcgatctgagtaaactgatctgcatccagtccgatgatatccgcgatcttctggtcgatctcccgcttcttcccctgaaatacctttccgtccggaagtgtcagttccaccttgggcgcctctttgacaaaacggggcgaaccatctgcgcggcgccgtttgccaagccgtatatactccggattcctcctgacagtatacacgtcccggcggtaagaaaatgtatactccacataggtctccacatcctcggacgcatactgactcctcatcatactgccgtcccgccttcctccgctcgtctggtcatagagcgcataggtgacggcgtcaaagatcgtggtcttccccgccccggtatcacccgtgatcaggaagatcccggactgtacccgggtgaaatcaagctccgtcctgcccgcataggaaccaaaggccgacatcactaattttattggtctcatctgcggctctcctcttctcctgccctgtcaattacctgttccaatatctctttttcctcgtctccaggctcccttccctgtatctctgcgtaaaaatcgcagaacactgccatgggatcttttaatacgagttcctcgtcaaactccgagagcttctgccttaccctgtcattgtcaagcctcacttctagtatatgtgaatacaccttttccagctgctctttcggcttatacggttccgactcatctgtcagcgttatgctcacataatcctctctctcttcttcccgggacacacggagaatatccttaagcttccccctcttccttatgacgtcccgcaacgggtggagaggaagtctgacaacctctggttcttcccccttttcccgcaaaataaccatagcaagcgacttattatgcccgctttcactgacagaatacttcatcggactgccgcaatattgtatgtgcccgcagccgacactctgggccccgtgcagatgcccgagcgccacataatcaaacggcttcacagcactcgtgtccacattgtcgatgccgcccaccgcgatcgtctcagaatcacacgtaccgggcgcggtcccctccccggtataaaactgatgagatatgagcacattccggcgtcccgcgaaatctataccctcccgctcaatgagcatccgcacagcgtcactgtagctctccggcgaatcattttcccacagatgcttcacatacgcaggctttaaaaatggaagcagataaaaatccacttccccgaattcatccctgagcgtcactttggagattcgttccacacccgtatccggcgcgctcccggccacatagacctgatgtgccttcaaaaatccggaggcatagctgagccgttccggcgaatcgtgatttccgcttataacgagcaccggaaccggtggctcaataccggacagcgctgtcagaaattcatcgaatacagtgaccgcctcagccgacggtacagacttatcataaatatctcccgcgatgacaatggcgtcaggatgtatatccccggcgtacgcggctatttccccgagcacctttctctggtcctcgatcaggttgtaatgatgcagctgtctgccgatgtgcagatcagacaaatgaaaaaatcgcaaagtaacccacctcttttcagacgtttccgccttctatctcatccacagcgctgatgacggcgtcccgaaggcccgcccgctccagcgcggccacgcctctgatcgtcgtcccgcccggtgaacacaccgcatccttcatctcgcccggatgctgtctcttctccatataaagcttcccagttccgcaaagcatctgggcggcaagttcatatgccgtacgcctcggcagtccgtatttcactcccgcgtccccaagcgcttccagaaacatgctggcaaacgccggaccgcagcccgccaccgtgcctgcagctcccacaaggtgtgtctctaccggtgtcacaacccctatagaggaaaacagacggtaaaatacgtcatattcctgtccgtcaagcgagtgtctgtcctcacacacagtcaccccttccccgacagataccggagtattcggtatcgtgcagatatagtgcacttctgttcccaatatatccctgtatgtgtcaaatgtatatcccgcagcgatggaaacgacgattttccctttcagcgcctttgcaagaggcttcatgacttcttccaccatatgcgccttcagcgctatgatgacgatatcagaattgccgatcacctcttcattcgtccggcacggattacatccgaaccttctgcagttcttttcaagtctctcataacttcctccgctcgcatatacctgtcttccctcaagcgctccgcctttgataaaaccttctaaaatagcctgcgccatacttcccagtcctataaaacctgtcttcatactctctctcctctcaaatctttatataacaagctgtttcagacgatttttaccccgagcagccttgcgatctccgccgcctgaaacatgtttattttcattccttccagctcccggtgctcttccgatacagtaatgccctcgatgatgctgtccgaaaagtcgatacctttaagcggtgtgcgaaagaaatcggcctttgtaaaatcagatttttcaaaccgtactgtacgaaaccggacttccgaaaaaaaagactccgcaaaattacattcctctgcactgcagttttcccacacagaacgtgtgaaattcgtcagatccagcctgcattcctccagactcacatgcttgagcaccgccatgtcaaactttgccccgtttcccttgcattcccttacagcggaagctttccagtagctcctgctgaaccggcagttggaaaaatcacatttttcaaacagtacactgtagaatcctgctccactgaaatcacagtcaaaaaatctgcaccttaaaaatctcgtgtttacgaattctgttttctgcatgtcttcttccgtcagctgttcgtccgtatattccctttcccgcagcggatactcctccgcccgggcaaactcgatatcctctgcgagcatgtaccgtttcctccgtcaaaatattctactgtcttcctgtatcttctgttaactttctcatgatacacagcctgcttcgcgcctgtcaaagcgtcagcagtcgatgcccgccttcctcgcctggcttccaagctcccggacgttcagtgtgtattctctgccgtcctttataaaatgcgtgccgcactgccggaattcaaaatggacgcctctgttcacacactgctcccgcagggcgagcacccagtcataatgaagcggcctcgcgttccgatccgactcgcctccgacgacgaccagttccacaccatccaggtacttttcgatatcaattctttcgatcagcggctgacagataatattcctgtgccggatcggcaaggtcccgaaaaaggacagccgttcgtccgccctggcctgattctccactgtacagccgatcgttacattctcatagccgtctccccagtcgctgggaatacaatcccagaagcgctcgatccgtttcgtcagaaagagaaactgaaggtccgggcgctcccgcatcatcttccagcattccctcctccactcgtccgcttcctcgataaaaaagtcggtggaaaaacagacgtacaccgtctgccccggcttcattttatacgctccctttttcgtctttctgaccggggcgtcaaaaccacttagtttcacgatatctccagtgtccattcccctctttgcatctcccttgtggatgtaacagaacttacacccttcactgtacttgtggcagccgcgccatggattccacatcgccacggctcatcacctccttcatcaggttatcccattctcccgcctaaaattttcttttgtggcatattaagcttttgatagcgaaaagcaccgctgcgtacccggcaagcgccgcagacaaaagtaccgtctgaacgagacggaattcatccgcgtcgccgtacacggacgctatcttgtccaccggcgggagaagccacagcacaaaccggaagagtggtatctcctggatgagacccgtcctgaccgcggtaaggaccgaaaacaggacggtcagcacgaccgcgagcttacggtcgcccatgactctcggatgcagaaggccgccgagcgcaccgcccgcaaaagaacagccggccacgagcagaaaagcgttcagcacgtcatacgccgtgagaggcctcatgaaaagcgccttgtggttcagcacgttctgaatgacaggaaacaatacgcacacagcgctcacaagaaggccgagtaccgccggaaccgcagccctgctcacataataacaaaagctgctcctgacacgcagcagctgaacctgctccatcaccgggttctcgtccgccgccgtacttaagccggtccatacaaggacaaaaaacacaaaataacacgtcatgacaaagctgtccacaacgccgaccggcatgatcgtatacatcgtatactcataaatgataatgaccacgagcggcatgataaacctgctccctttaaaataaacctgcagcccgtaacctgtcagctcaatcatcttcttcatcatacattcctctcagtttccagccgccacagagcagcccgggcaatatgcggtcacattctttttcctccgccttcagcctgtagtaacgtccatattttgtcatgccgcctggaaccgcaaagtctcccccatgttccagcaaaacagttcgcatctttacctcttctgccttatatgccttaagccgcccgtcccgtatcgtatatacctcttccgccaccgcctttacgatatgtgtctcgtggcaggacaggaacaccgtcacatccctgccgcgcagctcattgactttatctgtcagcaccttctgagactctctgtcctgtcccgacaccggttcgtccagcagcagtacatccggccttgtaaggagcgcctggatcacacccactttctgcagtgtccccttggagagtaatctcatgggcacatccagaagcccgccgagaaaaaagtcatcaccgagagactcgatgcgctttcccgcctcgtctcttctcatgccgtccagcgcccccatccgcagcaggtactgccttgcagtgaccgcagccggcggaaatttctcaggaatatagtgaaacagcagcggccgctcgtgtacgactcttcctcccgacgggaccgtaagacccgcgatgattctaagcagcgtactcttgccgcagccgttatgtcctacaaaagcagcggactccccctggcagaatcccttctctataccgtccaggacaagcttagctccatatttttttgatacattttctaatcttattatttccattccactccctgccctgaatcagcggatcaaagaagataccccaccgctatcaggagatagctgtatgcaggcctcctcttaactttcaaatacataaaaccactcaatacagaaaaaatcatacacgagatcccattccacagttccagtcccacgccgcgggatataaaatgaaagctgccccacgtcagagccagcacgataccgccaaacggtatgccgctctctcttttcagcagaacctcggctgccttctgtccatataggatgataagcaggacaagccctgcctcaaacatgtagtagatatactgtgtgacgatccgggacatatcctgtcccctggattccccgataatcttcagcgtatgccagtcaatgaaggtcagcgccttacagcccgccagagcgagcagcgcagccgcccagtccccgggcggtatcctgcctgtatcttctgccttccccggaaactgataccgcctccggctgtaatacagcagagacagaatgaagacagcccacagacacgccgttatcacactgtggacacttctctggcccggtgtataatttccggcgtctacatggagaaatactctttctatcacaaatatggagagcaactccagcatgaacgccgcaaacgaaagcaggctcatccagagatagcccgtccattttccttctctgtccattatgatatcctcatacctcttccctcagactgtttctgtcaaaaaccgtccaaacctttctgacttccggcggtttcaccgtcgtcttccttcaggatctcgaccccttccacctcaaagcaggtgatccagggatattctatataattcactgctatatgatccggtataatgataccttctctcggataatagacatttccaagctcgctttcatctgtctcgtatcctttcgccagcatggcatcgctgccctcgtcggtaaagcttaccgacatctccttgtacggaggagcacatcagctcgttatatcctcaatgttcaaaacgatatgtttccactcatatttcagcatgtaggctttcgcctgttcattcagttctaccaaaaccataccctccctttcttaaatcagtattccggtccggtaactatgataatacagaaacttctgcctcatccaatacattatcaaaacagcgcagaccgtactctctaccgcctgcgctgtgtatttttcacttatattctgtagtgatgagccctttatttctgcacgatgtttatgatcttcttcggcacatagatctctttgacaaccgtccccgtcagcttgtcggccacagcttcccttccggccgcgatggcgtcctccttggacacatccgccggtacggtgactaccgcccttgtcttgccgttgatctgaaccggaacttccacttcatcatctttcatggcattcacatcatatgacggccatccggcgttaaatacactgccttcatgtccgagctgctcccagagctcctcgcccatatgaggcgcgaacggagagagaagcactgcaagtgttgaaagcgtctctttgtctaccccgccttctctcttggcgatctcgatcagcttgttattgtgttccataaatccggatattaccgtattcaggctgaagctgtccagacgtgtcgtgatatcgtacaccattttattgcggactttgatcatttcctttgtcgctttgatatctttgtctttgctctccatcacaagattccatgcccgcttcaagaaacggtttacaccgtcaataccgcggtcatcccactctgcgtccagctccggggggccgacgaagagttcgtacatcctcagagagtcgcatccgtagtctctcaccagatcgtccggagagactacgtttccttttgatttgctcatcttaataccgttcttaccggtgatcatcccctggttgaacagcttcttaaacggctcgtcaaaatctaccgccccgatgtcacagaggaacttcgtgtaaaaacgggagtacagaaggtgaagcaccgcatgctccacaccgccgatatacatatctaccggaagcatctcatctgctttttccctcgatacgagcgcttcgctgttgtggttgtccacataacggaggaaataccaggaagatcctgcccactgaggcatcgtgtttgtctctcttttggccggctttttgcacaccggacacgtacagttcacccactcctcaattccggccagcggtgactctcctgttcctgtcggctcataggactctacgtccggcagtgtcagcggaagttcatcctcgggcaccgggaccgccccgcattccggacaatgtatgatcgggatcggctctccccagtaacgctggcgtgagaacacccagtccctgagcttgtaatttacggtcgccttgccgatcccccgctcttcgataacgtggggcgcttcttttttcagcacagcagattccataccgttccactcaccggaattgatcatcgttccgtttgcttctgtgtatgcctctgtcatattttctatttcttttccgtcttttgcaatgacctgcacgatcgggataccgaatttctttgcgaactcaaagtcacggtcgtcatgggccggaacacacatgatcgcgccggtaccgtaatctgcaagtacatagtcggacagccagatcggcgtcttctctccgtttagaggattgactgcatagcttccggtaaatacaccggtcttttccttgtcctgcatacggtctacgttggacttcatggaagcgtcataaatatatttttcaactgcctcttttgtctcaggagtggccagacttgccgcaagctcatgctccggcgcaagtaccatgaatgttgcgccgtacaatgtatccggtctcgtcgtgtagactgtgatcttttcctctcttccttctaccgggaagtcgacttccgcgccatatgatttgccgatccagtcggcctgcatcttcttcactttttccggccagtcgagcttgtccagatcgttgagcagacgctctgcataggcggtgatcttcagcatccactggcgcaggttcttcttcgtcacctcggtgccgcagcgctcgcatttaccgttgacgacctcttcatttgccaggcctgtcttacaggaaggacaccagttgatagggaattccttctcatacgcaaggccttccttgaacattttcacaaatatccactgcgtccacttatagaattccgggtctgtcgtattcacttccatgtcccagtcgtacagcgccgcgatctcattgatctgacgtttgatattctctacgttctccgctgtggatctggcagggtgcactcccatcttgatggcatagttctcagccggaagaccgaaagcatcccaccccatcggatggacaatataatacccctgcagtaatttatatctgctccagacgtcagaaatcacatatcctctccagtgtcccacatgaagcccgtttcccgacggatatgggaacatgtccagacagtaatatttctggcgttttccattctcatcttctttgacgttcaccggattctcctcccagcgtccgcgccatttcttctctattgccttatgattataaggtgtgctcatggtttattcctcctattttaacactatttctaattgtaccacatgcgttttttgtgtcaagttattcccttcaatttatttcacttttctggttgtctatcatggagaattaatgtataataaaagacaagaaaatacgtatgtcaaatacataaaaaaggagtgtttcccatggtaaatttattgattggccctaaaggcagcggaaagacacagcagatgatcgaacaggctaacagccaggtgaaagtctgcaatggcaatgtagtatttattaaaaagacacatcgtgatacggcaagtgtggcgtttgatatccgcacgatctgtatggatgactttaaatcaatcgaaaatattgatgagtacatcggatttttatatggcatgtatagttccaaccacgacattgaatgtgtatttatcgacgggcttttgaagcatgccgatatctcactggaaaatgtgccggaatttattgagagactgaaaaaggtttccagggaatgcgaaattgaattttacgtaagtctcagcgctacaaaggatgaactgtccggaatagacatggcggactgtacgttattgaattgatctattgaaccgttcgtgttcagtagatatatttatctgtaactacatagtgagggaatgcagggcagttcagaattgaactgccccttttacaagagaaaaagattatgagtgggatcaaagacgcaaaacgaaaaagggacaggcgccggaagcagagaaagctccggctgatgcttggcgctctcctcgccgtcatattatgtatcgctgttgccgccggcataaaaagtatcgttgcaaaagacaagcctgacagcggaaaaaaaacggcaaagacagagacaaaggaagaaaaacctgacacgtccaaagtagaggtcaaaaatattgtcatccatacaaaaaagggggagaaggacacaaaaaaatcgacgtccatcacggtcagttccatcggtgactgcacactcggaacagatgtgaacttcaatcccgacacaagcctgaacgcttattacaacgcccggggcgccgactattttttccagaatgtacggcccattctggaggctgatgatctctccatcgtcaacatggagggtactcttaccacggaagaacagcgcgaagaaaaaacgtatgccttcaagggaccgcccgaatacgcagccatcctgtccggcagctctgtggaggcggccaaccttgccaacaaccacagccgcgactacggcgagaaaagctacacggacacggtcacggcactggaagacgcgggcgttgccaccttcggttacgagaaggtggatatcctcgatatcaaaggggtaaaggtgggactgaccggtatatacgaactggcggaacatatggaaaagaaacagcaggtgaaggaaaatatcgccgccctcaaagaagccggcgcacagttgatcatcgtcaattttcactggggcatcgagcgggaatacgtcccgaacgacacgcagaaagcgctggcccgcctcgccgtcgacgaaggcgccgacctcgttatcggacaccacccgcatgttcttcagggcgtggaaaagtataaaggacggtacatcgcctacagcctcggcaacttctgtttcggaggcaactccaacccggaggacaaagatacgatgatattccagcagacgttcaccatcacgaaggacggcgtaaagaaagacgataacatcaacatgataccgtgctcactgtcgtcggcaggcggatacaacgactactgtccggttccgctggaaggtgcggaaaaagacagagtattaaataagatcgacgaatatagtcaggcaatagattgaattttgaaaggggtcagacccctgctatggcagggggtctgacccctttcaaaattcttgccaattacactaaaaattcgtacaataatgtcatggccggcatcgttacgatgcagaatatgatggacattacgtttatgacgcttgcatacattgcgtctttattgtatatctgcgccagctgtgtcaccatggcagcggccggcgccgaacctgccagcagcacaacgagcagtatgtactccgcgtctttatgaagcccctgcattcccgcaaagcagaataccgcgatgaatatgagcggaaaagcgatgagcctgataaagcagataaaataaggtctcttctgtctgaatacccactttaagtctatgtttccgatgatcattccgatgacgagcatgctggccggtcctatcatatctgcgaacccgccgatacagtcccggatcggaacggggagacgcacgcccccggcaaaaagaagcatgccgatgaatatggctatgatattcgggttcagaagtatcttcttataattcttctgcggctcgcggtcaatcactccgatcccgtgcgtccagagcagcagtgtctgcacgaccatatacgcggtcgagtaaaatacccactcctgtccgagtacggaagagacgagcgggacgataagattgccggaattggaatagatgaccgacatcttctctatcggattcagattcagcggcttctgcacgagcctcgtccctccgacaagaagaacatgtataataacagctcctgccgccgccagcaggagccccatgatcttatcttttgtcagtgttatctgaaaggaattcactacaacgcagggggaacagacatatacgactatattggacaggaccttgctgtcctttgactcaaacaaacctgatttcaccagcacatagcctgccgccatcataaggaacagagccacgatctgttctgccaacaatatactaagttccattattcctccgttttcgtatcagccgcttccttgccttccgtaagagacatcaccgtgttggctttctctccctctttatattcgatggtgacttcctgccccacatcgtatttgacgatatcgatgaaatcaaccacggacacgtcgaaaatttcatccgagccttccagcatgacatagtaatgcgatgaaccatcgataaccgcctgcgcgatcttcgtgatcttgccagtggccgtcatcacctctctcgtatccttctccacctctttcacaccgttgctcagcagcagatcgagataattctcctcacactggcttacgctgtcgccgatggccacgatctggtacttctgtacattgaccatagcatacttctttacaagccccgcatcgtccttcagcgccataaaataggtcggctcatccgcgatattcagaagcagcgggaatgtggctgtgtatttgaggttctgtacctgtccctctgccgaggacatggccgatgtctccgtcgcgccttccaccttgtaatatttcgtctccatcgtccgctggttggaaagcacaaatccgacattggactggtcgccgttcacagacgtgacgcccgtgtacatccagacatcatcatccagcgccagataattatatccgtcggtcgtcttcagacagtctttctgcccgagcacgctgttaaagaacccatgcttcaaagttccgtaataatcaaacaagtcaacgagcagatccgcggaatacgcgcggtcgacccactgcgggacatcctcgatcttatattcctccgtctcgcctgtgaccgcgttgcagagcaccactttgcccactgtctcgccgccgaacaggccgatattaaatttctttacaggagcgatccagtacggcgtcccctcctcgtctatctcaaagctcagatcatcatagatgtacgtcggatgggcaaatctgagatgacggtatatattccggttgaaatgctcactcgtcgtgtactttatcccttcctccagcttgacaagctcagtcgtctgagtagccatattgatgcggatataagccggtattccgtttgaacggttcgtaaaccacttgataagacttgcatacttgagcggtgtcacgcgcaccggattgcctttgtagttgatctggctgtagatctcatccgcctcaaactgggagaccatgtccaccatgcttcccatcttcctgtcgccgagaagttctgccgtatccttatcaagcagcgggatcttgtcaaatgacagttcctccacatcctccgtaaactctccttcttccaccttcataagcttctggtacttcttggcgtttacgatcggcgaggacagcagcgcccctataagatagatcacgcccacacccagaacaaggactccaagcgtcttcatcactttattctgcttcagctctcctcttccaagcttcttgcgcaccgcatacagtacagccgcagctgccagcagaaacagtacaaagaaccagacatccgatgaatgaatgttgatagccggcaaagagacataatagtaaagacccgctgccagtatgatgataattgccacaataagtttcctagactttttcataaacttctccttctcttgattccctccgtcagaactttctcctccacgccgacagtgtaaacagcatgaggaacgggaatatctcaagtcttcccgccagcatgtcaaaacagaacactattttggacagtggcgaaaactccgcaaagttgcccaccggacccacatcgccgataccaggtccgatattattcagcgtggccatgaccgaactgaacgtagttccaaaatccagattgtcaatggacacaagcagtatggagcccacgacaattcccatatacgcaagcaggtagatatatacgacgcggagcacatccggaccgatcttcctgccgttgactttgataaggttcacagacttcggatgcagcatctgctttatctcccgcttgatgctctttatgatgatcatgaaccgggacactttgataccgcctccggtagaggaggcacaggcgccgatgatcatgagcagtatcagtatgcactgcgacagcatcggccatccgttgtaatctgccgtcgcgtatccggtcgtcgtaatgatagaagccacctggaaggaagcatagcggaacgcctgcaaaggattcggaaactggccgctgatgttcagtgtgatgaccgcgaccgcacctgcgataattccgagatacaccctgagctcttcattcttccagactgatttcgcctcgccgagcagaaggaggaaatacaggttaaagttgatgccaaacaggatcataaagactgtgatgacaccgtcaatataggcactgtcaaaatgtcccacactggccccgtaattggagaaccctcccgtgccggccgtgccgaaggcatggatcaggccgtcaaacagattcattccgccaaataaaagaagaatgacttcgataagcgtaaggccgagatacatggcgtataaaatacgggccgtcgacatcatcttcggtacaagcttatccttctcaggacccggaacttcggcacgcataaggtacatcgtattttttttgtccagactcgtgagcaccatgacaaaaacgagcacgcccataccgccgacccagtgcgtaaagctccgccagaaaagcatgcattgcggaagttcctctatgttctgaaggatagaagaacctgtcgtcgtaaaaccagacactgtctcaaagaccgcatcgagatagtaagggatacttccggacagtgtaaaaggcagtgctccgaacagtgaccagagaatccaggcgctggcaacgattatcatgccctctttcccgtatatcgtacggttctggggcttgcgcttccccgcgatgaaataaatgacaagcaggaccgctgataccggcagaaaacaaagagcctctttctctccgtagacagcgcccaccagtgccggcaggagcagaagggccgcttccactccgagcatcttggccaatatataacgtatcatttttgtattcataacttttctttagactccctatgcaagtatatcgctcaaatcattgatgacatgttcttttgtaatgatgatcacactgtctccgacttccagatggtcttccccgcccggaatgatgatcttccggttgcgcccgatgcaggcgataaggttattcggctttgtaggcaggtccttcagcggtatatttgtataatcgccttcttttttgatgatgaactcctgcgcctctatctttccgttgataagccggtacatcgtctccatgttcacgcttctggccgaattgtttctcgctctcacatacccgagaatagcgtccgcggttgcgctcttggcggaaatgatactgtctattccaagaccttccaccatctgtgccctcgtatcctcgtttaccttggccacgatcttgttgacgccctgcgtcttggcaaacagcgccataatgatattttcttcgtccatcccggtcagcgcgacaacggcgtccgcgctctggatcccttcttcgagaagcagttcatggctcgcggcatctccgtggattatggtcgcccgcggaaggttctcacagagcacctcgcatctcttctcattctgttctatgatcttaacctgcatgccggcctgcagcagctgtcccgttagataaaaacatacgtgtccgcccccgcagatcagcaccttcctcacctttgtcgtcttacggccaagcgcgcagaaaaaggacttcagctcctggtgggccgccgcgatgtgcagcttgtctccccgctcaagcacaaagtctccgtccggtatatagacttctgacccccgttttaccgcgcatacgagaattttgatctgatatttctgatagatctcagcaagtgacagcccgataagatgactctcttcacggaccggaaattcaaccagctcgactcttcccttcataaatgtctctaccttgctcgtctccgggaaaagcagcaccctcgctatctcgttcgccgccgccagctccggattgacagccatgctcagatgcagatcctccttcagcagatctatctgccggtaatagacagggtttcttaccctcgctatcgtatgtttcgctccgagtcttttcgccagcagacagctgagcatattgagctcatctgtggacgcacaggcaatgacaaggtcagcgtggggcacgtcggcctgtttctgaatctctacatcagcgccatttccagttatacagaaaatatccagctggttgagcgcctcctttaactttccttcattctggtcaatgagcacaatgtcgtaattctcttcagataactgagcggtcagtttatggccgacttttccgtcacctatgatcacaattttcattttctattcctcatatatattctctattgttttcaatatagcatagagattatagcacttttgttttaagaaaaaaagcccttaagggcttttcttctataattattattcgctgtcagcagctctcttggcaacttcagcttcctgaatgtcggaaggagcctgttcatagcggctgaattcatattcgtacgtgcctcttccccctgtcatggagcggagaactgtacaataaccgaacagtcccgtcatcgggatatcggcctcgatcacctggaaacctccggccgtcggattcatgccgagcacacgtccgcggcgcttgttcagatcgcccatgacgtcaccggtgtaatcgtcaggaacggtcaccttcagggacgcgatcggctcaagcagaaccggggccgcctccatgaaacctttcttgaatgcctgtactgtggccgtcttgaacgccatctccgaagaatcgaccggatgataagagccgtcatagagcgtggcctttacgcccactaccggataacctgccagaggaccctttactactgaatcctgaagtcccttttccactgccgggaagtagttcttcggcacagcgccgcccactaccgtctccgcaaatacgaacggcgtctccagatctcccgatggttcaaacgtcatcttcacgtggccatactgtccgtgtcctccggactgcttcttatattttgtatcaacgtcagattttttcttgatcgtctcgcggaaggctaccttcggagtgtcaaggctgatctcacatttatatcttgccgcaagcttgctcgccgcaatgtcgagatgctggtcgcccatgccgtagagcagcgtctgtctgttctcactgtcgttgacagccttcagtgtgacgtcctcggccatcatcttctggagcgcctgggacactttgtcctcgtctcctttgttcttgcatatgtatttcatataagtgtacggcttggaatattctgtccttccgtacagtacgggcgttcccttggcggagagcgtatctcccgtcttcgtgctggaaagcttggcgatcgcgccgatatcgcctgcgaacatctccgatacctccaccggcttgtttccgaccatcgtatagatctttccaagtttctcttctgtatccgaatctgcgttataaagtatatcttcgcccttgagcacgccggagcacacttttatgaaagaatactttccgataaacgggtctaccatcgtcttgaacacataagcagactttgcttttgaaaattcgtagtttgcctcgaatatctcatttgtcttacggttgatccccgcacattctctgttgtcgggactcgggaaaaatctcacgatatcggacagcagatttgccacgccctgcgcctgaatgttggagcccatggacaccggaacgatgctgccgtccatgacctcggtcctcatggccgcacggatctcctccactgagaattcttctcccgcaaaataacgctccataaactcgtcgctcgtctctgcaacggcctccagaagcttttccctgtagatctcaaggttcggtctgcagtaatccgggatctcgcattcttcgcgctctccgattcctgtataacgcctccccgcatttttaataacattgacatacccgaccagcttttcattttcacggatcggctgaaaatgcggtgcgatcactttgccgtacttgtcggtgagttcctgcaccacctcacggaagctggcgtcgtctacgtccatctccgtgacatataccatacgcggaagattatatttgtcgcacagctgccatgccttttccgttccgacctgcacgcccgcttttccggacactacgatgactgccgcgtcggccgcgcttaccgcctcttccacttctcccacgaagtcaaagtatcccggtgtgtcaagcacattgatcttggctttctcccactcgatgggcactaaggttgtactaattgagaatttacgtttttgttcttctttatcaaaatcactaatcgtgttggcatctgatatctttcccatccgatttgttgctcctgatacataagccatagcctctgtaaggctcgtctttccgcttcctccgtgtcctaaaaggactacgtttctaatctcatccgttctgtaaaccttcataattcgctgcctccttatattggtaaaatctcatgtatatattgtactaaaacttgtgcctttttacaactcttttatgcattctttacaacaaatagtgctttttcactttaaagcgctatagtattgacaaaaccggaaagaaaagttagaatttaggacgtaaacttttgagtaaggctgcgtttttcgatacatttaagccccctgctcaaaggaagaaaggtgtgtagctatgcataataaaattggttttatcggccttggtctcatcggcggttcgatcgccaaagccatccggcagtattttccggactatgagatcgtggcttttgacaaaaacagagagacgcttgccctcgccacgcaggagtctttgatccatgtggcggcaacttcaatagataacaacttcaaagactgcagcttcatttttctctgtgcccctgtagcttacaatacggcttatctgaagcagatacaaggattcatgcacagcggctgtatcctgacagacgtagggagcgtcaagacgaacattcatgaggaagtgaaagccctcggtcttgaagattattttatcggcggccatccgatggcaggttctgaaaagagcggctatgtaaactccaaggccatgctcatagaaaatgcctactatgtcctgacgccgtccgcaaaggtcccgcaggagaaagtaaaacggtaccgggagtttgccgaagcgctgaaagccataccggtcgtcctcgactaccgggaacacgatcatatcaccggcacgatcagccatctgccgcatatcatcgcctcaagtcttgtgaatttcgtgaaggataccgacacagaagacgagatgatgaagcagctggccgccggcggattcaaagatatcacgaggatcgcgtcgtcgtcgcctgccatgtggcagcatatctgcctgaaaaacagagagaatatctccggcattctcggggaatacatcgccgcgctccagaaggcaaaagagaccgtggaccgcgccgacgagcagggactttacgacctgtttgacaactccagaaattaccggaattccatcccggaatcttccgcaggtccaatcaaaaaggcctttgccgtatactgcgacattatagacgaagccggcggtatcgcggctattgcgaccatactggcatcgaatagtctgaacatcaaaaatatcgggatcgtacataacagagaatttgaagaaggggttctgcgcattgaattctacgacggggtttcctcctcgaaagcggcggatttactgcagaaattcaggtacattgtatatgagcgttaaaaacataggaagatcttccggtctgaaaggaacggtgtgcgtgccgggtgacaaatccatctcccaccgcgccgtcatgttaggttccatcgcgctcggaacgacggagatcaccaacttcctcgagggggcggactgtctggcaacgatcggctgctttcgtaagatgggcgtagagatcgaacagcggcaggaatgtattctcgtccacggaaagggccttcgcggcctgcgtccgccggccgggatactggacgttggaaacagcggcacgaccacccgcctcatatccggcatcctctgcgggcaggatttcacctctgtcctctccggcgacgcgtcgctaaactcgcgtcccatgggccggatcatcacccctcttaggaacatgggcgcgtccgtcacaagtgtgaacggaaacggctgcgcgccgctgaagatcgaacccggccgcatacacggcatccactacgagtcccccgtggcatctgcccaggtaaaatcagccgtactgctcgccggattatatgcggacaacacgacttctgtgacagaaccgagtctctcccggaaccataccgaactgatgctgcagaacttcggagccgcactgtcggccgccatgcaccccgacggccgcgccacagcggagcttgccccgtgcacagagctttacggccggcagatccatgtgcccggagacatctcctccgcggcatacttcatcgccgccggactcaccgttccaggctcagaactgcttttaaaaaatgtgggcaccaactttacgagagccggtttcctaacggtatgccaaaatatgggcgcccgcgtcacccgtttaaatgaaacggtacagggcggagaagccagggccgacctcctcgtgacgccgggccgcctgcacggaactgtcatcgagggggatctcataccttccctcatagacgagatcccggttatcgctgtcatggccgcctgcgcggaagggacgaccgtcatccgcgacgcggcggagcttaaggtcaaggagacggaccgcatcgctaccgtcacggagaatctgcgcgccatgggagcctgcgtcacaccgacggaggacggtatgatcatagaaggccgcggcgggctaaagggcgccttcattgaaagccatatggaccaccgtatcgccatggccttcgccgtggccgctctgtccgccgaaggagagagccgcatcaacaacagccagtgtgtggacgtgtcctatcccgccttctgggagacacttgacatgctacgttaatactgccgcctcccagcatactccgcagtgccgggcagcacaggaaaacaaacaggacgcagagacccgcaacgggaccgcgtcctgttttatactgtcattatagatttaaatgtgcatccatcagatatacgccgtccacatccgggtctgccagcagttccagcagttcgtcccggccggcattgacgaccgcgccgtatccgtttaccccgttctttttcacgtaatcgagcgccgattcaaattttatcctgttaaacacattctcccccggcacttccgacgcaaatatccgtccgaaccgctcgttgtccgtcatgtaagccagcaaggaaatgacatgcttttccaggacatccgccggtatcctgccgtctttttcgtattgtgccagatccaggtacgggtacttctccgtatcatagctgtctgtcctcacatagcccgccgcgtcaggccggtatcccatatattccgtcatcgttcctttttgatcctcatacgtctcaaaaggtacgtacagaaattccccgctgtatttatccataaactgtacgagccggccggtatcttttggctctttgaacgatatggccgcacggacggccatcgtatccggcagcccctgcagtctgtccgccgcctccctggcggatatccctgagaacgagtccctctcctccacgcagtaagtgaacgcatttccgggaacttcagactggttccagctcatatcggtccagtacagatggttcttgttcagttccagataatgatggtctgttctgccgttcctctgtgtctgtacatcaatggaatgcctcccgtatccctccgggcgcacatgtacattggcatatcctttgtctgcgcacataagttccatgtaaaccgccatattaaggtcgatgggcggatccgaagccttcggccgcgacggattatagtaaattgcgtccagcgcaggggacagcacattgacgccgataaacacaagcagcagcacgaccgcccccgtaacagcggcataacggcgcagctttctgttcacggcacgggatatgcggcggctcaagtcatgctcccggccgttccactgcgccctccccggcttatcctttccggcactttcatcctcagcggaaaacagttcttcatccatgctgctgtcgagatagtcgagcagcacctgcgtcttctccagatcttcctctatccgggctctctcctccccctcaagcgtcccgtccacatattttctgaatcgctccctgtagttcatacgtcacaccctccttttggtatcactgcctccatgcctctttccgtcagactccttcagcatctctttcagctttcgtttggcccggtgcagtatcacccggacattcccatgcccgatctccatctgccgtccgatctcttcctgggaaaatccggcaaagtaataaagcacgaccgcctcccgctctctgtcgctcaggcagagtatcgtcccgtacagtctccggttctgttccttctttatgagctgctccagtatctcctcttcctcgtctgtcaattccctttcttgctgtatccggtatgccctctctcttctccagacgtctatatacaggttcttcgccaccctgagcagccacggaaggatccgctctgtctgctccagggagcagagcgccctgagaaatgtttcctgcgtcagatcctccgccgtctcatggctgtgacaaagggagaaaagatagaggtaaaccggcttcatatattccatatagacctgctcgagcaaatccttctccactttatcaccccctttaccatagaaacggataactcaccataatgttacacaggcggagaatcccacttgtgggaatctccgcctgtgttctgtccttcttctcaataatactttacatttacatttttcccgatgtgctccgcacattccttcagctggtccacaaggttcatgcggatgctcagatcaaacggcaggttggaattctggtgcgccgtgttgaccgctttcccgacaaacatgttcaattccgtacactcttctatgatcagcttcgccagctttgccgcgccattttccgcgtccagctcatcaaagaacgcctcgtcaaattcgtcctgctcgtaacgccgcagaagattgagcgccttcccgagtgtcaggactccttccgtcacaaggtctaatccatctatggccgctgtcggcgggacattcgggtccgcatagttcagcgatgtgacgatatctttatgcaggatccttgcaactatattggcgcttgtaccgccgcagacgaccttcctgccttcgcccctcataaagtccttcaccacgcgctcatcgtcttccttctgtgtcggcggtccggtgaagagattgacgatgcgccgttcgatcactctggtgacggccactgtcgtgtcgtccccgggcttctgcccgtacaggtcatcacatgctttgctcagcatggccgccagacgggaggcggaaagtgtctcttttgtacatttcagtgtgtattccgccatgctgtcccacgtccagccaaagttcagcaattcccccactccagcatagatgacgccgtcgctcataagtacgaagcagtcattcagctgcactttgaaccggtacagatggatgaccttgtcctctatgacccgctcttcataaggatagtccacgacttttccgtctcttacaaacacacaggacgggttgtcaaattccacgagatacgcgtccccattgtggaatatctgcaggatgctgaacgtggcatatgccacctccctcaccttgcagaccggcagcgtcttcgcgatcgtctccacacaggcttcgatcggggcgccctccagatacatggtcgccagtatcttggatgtgagcgtcgccagaatatttgccttcacgccgctccccatcccgtccgccagtatgacgatctcggagtccccggtcttgagcacttccaccttgtcgccgcacagttcttccccgtgcttgttcaggctcttccatgccacatctacacttacattcatactactctccttcttcttcaaaaagaatagaatctctgagcttggacagcgtcacctttgtctccgccgtcgtctccccgagcagtcccgcgatctcctgtgcaaccatcatctgcttgtcaatgactctctgcgccatctccacagtctctatcttcaggttgtaatgctgctcctttgccttctcttccttcgtgatatcctgatatgtcacaagtacggattccagactctcgatataaatgatcgattccaccacagtcattccgatggattccagccccaccttcttatggatgacctgccgcttcgtgcgcaggacttccgcgatatctctgtcgtccaggaattcaaatatgtaccgctccagcgcttcctcacgggagacgtcaagcatctcctgcgctttcttgttgcactcccggatgcgcatatctttatccacgatgaggatcatactcggagtcacatccatgacgacattggacatggactcggcctgttccagcgcatggggaaggcacatgcctatctctgccttcttctggtacacggccactgcctttgcacggcatgtcggatacccgcaggcgccgcagttcaattcatcctccgccgtgtattttcccatggctttcaggacgtcccgcatctcgcttccgtccggcatcctgtccgcaacgtggcggtcatggaactgcttttccatggaaatgctgctgccgtcgatcccttccgcaggttccctgtgtccgacctgatcttccacgttcatcttcgccttgatgaccgtctgctgccatttgtcggaagccggtcccttgatacatccgccctcacatacattcacttcaaagaagcagtcggcgatctcgcccttcatgagttcctcgaacagctccatacagggcttcagaccatccacatacactttatagtaattgtcctccacggaatccgccagtatcgactttacgatccccccgccgacaggatacagcttgttcaccctcggatccggattgccgagcgggcggtcctcacaggcattcacgtcaattccctctgccgcccaccactttgtgatctcctcaaaggtgagaatggcatctaccgcgccgatgaccctcttgtccccgacagcctcttccttttttgcgatacacggcccgagaaatacaaccttcgtgtcttcaccgtatatctgctttatgagacgcccgtgggcgatcataggggacacgacaggcgccatctgcccggtcagggcaggataatatttttcgaccagatcattgacgcttggacagcacgttgtgatgatatttttcatttttccgtctttcagaagcttccggtactcctgcgtcacaagagcggctccttccgccgtctcacgcacctcataaaaccccagcttcagcagcgcgtccaccacctgtcccggcttttcatattccagaacgccgaggtaggacggcgctatggagatgactgttttcatcctctgtttcagatacccctttacccgctccatatcactggcaaatgtcttggcattctggggacagacttccaggcagtggccgcagttgatacagtggtccttcatgatatgcgcctgctcgttctgtaccgagatcgcctttacctcacagttgcgtacacatttataacagtgtctgcagcttgcatctttaaaatcgattaccctcacctggccgcctccttccgtatgacttcacggaagaaatcttccgcgtcttccggcttcacatgataaatattctccccgatcttcacgcttacccctttggaacaggctcccatacagaaggaaccgcacagttctacctgcgcctccagcttctcctctttcagaagcctgttaaacgtctttacgatcgtctccgatccccgcagatggcaggaacttccgatacatatctggactttcataatgtgcccctttccgctcctcgcgcagatatcccggtccgctttcaccgcctaagatcatccggtccgtccgcacttaaatatttgcaatcattataacattaccggcgtattaacgcaattcgacttctgcatccgcatccatcattatttgtatgaccgcggacgcgtaagggccggcctgcgcatgattcagcacaatgactctcagcccggcgcattccgtgagacagtcgtaaagcgcatccagattggccccataataatcagggaatccaagcttttccctgaggtatacatgagcctcttcttttttctgcatatgtgcggcatccagtataacttccttcatctttccctcctgtcattccccttcgtataacaagtcaaagctctcataatggtcttccgtataatagacaaggccgtcgtccgaatagacgatccgctctgccccccggtaccctccgtctccgccgatatcacactcatagtatttccggcccggcttttccggcagaagcccttcatagttgccgaacgggtcaccgccgatgcttttccccggtgccgcctcgcccaggttcccctttctgctgtcccagccgagcgcttttgcttctttcttcgtgatatagttatccggcagatgcccatatgtatgtatataagccgcaacttcttcttttgaagtatattcccccgactcctcaactttgactgtatttcctctgtctcctgtctcctgtccggctccgccggcggatattccataatcgtccgcaccgccgcagccgccggccgtcagacagaacagcaggactaatacccctgccaggcagcgtaactttctgctcatagttctccctttctgttcacatggatctgatatgttcattatacagattcttcccattgactgtaaacattctgctcactttttcctgattttctattccattgcgaatgtatgtttggtataatgagtaatacagatccatgtcttagataaggagtgaccagttatgaacgaacaactctctctttttgataacgaacgggagctcaccccgctcgccagccggctccggcctgaaagcctggacgattttgccggacaggaacatctgcttggtcccggcagactgctgcggcagctcattgacaaagaccagatatcctccatgatattctggggacctccgggcgtaggcaagacgacgctggcccgcatcatcgccaggaggacaaaagcggattttatcgatttcagcgctgtcacaagcggaatcaaagaaatcaaggaagtgatgtccaaagcagagaaggacaggcatgccggcatccgcacgctcgtctttgtggatgagatccaccgttttaacaaagcccagcaggacgccttcctgccatatgtggaaaagggaagcatcatcctcatcggagccacgacggaaaatccttcgtttgagatcaatgccgctcttctgtccagatgtaaagtatttgtccttcaggcgctcacagaaaaggacctgctgcgcctgctcggccacgcgctctcctccccggccggattcgggcatctcaatgtagatatcacaccggaatccctccagatgatcgccggctttgccaacggggatgcgcgcactgccctgaacacgcttgagatggctgttctcaacggcgaactcacgcccgaaaagaccattgtcacgaaagcgtccatcgaacagtgtatcagcaggaaatcactgctctacgacaaaaatggggaggaacactacaacctcatctccgcgcttcacaagtccatgcgcaacagcgaccccgacgcggctgtctactggctgtcacggatgcttgaagcaggggaggatccgctctatgtcgcgcgcaggctcgtccgctttgcaagtgaagacgtcggcatggcagacagccaggctcttccgctggccgtggccggctatcaggcctgtcattttctcggaatgccggagtgcaatgtacacctcacccatgttgtcacctatctgtccatggcgcccaagtccaacgctctgtatatcgcctgtgagacatgccgcgcggacgcacagaattgtctggcggaaccggtgcccctccacctgcgcaacgcgccaacaaagctgatgaaagacctgcactacggaaaaggctacgagtatgcccatgacactgacgataagctgacaacgatgcagtgtatgcccgaccgtttaaaagacaagacctactatcacccgaccgacgagggcgcagaagcacaggtcaaggccaggcttgcgcagatcagggcgttccgcggtacaggcatggacagcggggaaaaataaaataaatataatttgcggttgacaattctttattactgcattataataaagcaaaattaacaaccgatgagcaagagtagtagctttgacgacatatttacagagagtcacggacggtggaaccgtgataatatccgtctcagtgaatggacttgcgagggcaaaccaaaatgacgcgcaccgcgtcagagtaggggcgacggaatccaaccgttatcatatggagcatgtatgatcgtacatggctgagcgcattctttttattgttgcagaaagaatgaatttaggtggcaccgcaggaatccactcctgtcctaatgatttaggacgggagtttttttatttcaaatgaaaggaaggaaactatgatgaaagacacgaaacaaatcccctacaaaatctacctcgaagaaagtgagatgccgaaacaatggtacaatgtacgcgccgatatgaagaataaacccgcgccgcttttaaaccccggaactttagaacctatgacttttgatgaactgcgcggcgtattctgcgatgaactcgtcagacaggaactggatgacacgacgccgttctttgatatcccccaggagatccaggatttctataagatgtaccggccttcccctctcgtccgggcgtactgcctcgaggaggcgcttcagacgccggccaggatctactacaagttcgagggcaacaacacatccggcagccacaaactgaactctgccatcgcacaggcatattacgcaaagaatcaggggcttaagggagtgacgacagagacaggcgccggccagtggggcaccgcgctctccatggcgtgcgcctacctcgggctggactgccaggtatacatggtcaaatgctcctatgaacagaagccgttccgcagagaagtgatgcgcacctacggcgcaaatgtgaccccttccccgtcggagactaccaatgtgggccgcaggattctggccgaacatccgggaacttcgggaagtctcggctgcgcgatctcagaggctgttgaagctgccctctcccaggacggttaccgctacgtactcggctctgtcctgtcacaggtcctgctgcaccagtcggtcatcggccttgagacgaaggcggcgcttgacaaatacggtataacgccggatgtcatcatcggatgcgcagggggcggctccaacctcggcgggctcatctccccgtttatgggagagaagttaagaggggaaaaggattaccagatcatcgctgtggagccggccagctgcccgagtctcacccgcggcacatatgcatacgatttctgcgataccggcatggtatgcccgctcgctaagatgtacacgctcggaagcggattcattccgtcgccgaaccatgcgggagggctgcgctatcacggcatgagttccgtactctcccagctgtatgatgacaaacttatggaagccatctccatagagcagaccgcagtgtttgaggccgccacgagattcgcccgcatcgaaggcatcctgccggcgccggagagcagccacgccatcaaggccgccatggacgaagccataaagtgcagggaaagcggcgaagaaaaaaccatcgtcttcgggctcacaggaaccggatacttcgacatgaccgcctacggaaaattcaacaacggcgagatgaccgactatatcccgaccgatgaagacctggcagaaggatttgccggacttccggccgtatagattacttttcattcgccgttatatcacagacagggcgcagccgtttcgacggctgcgccctgtattacatgtcagtccattctttacaggtcaagatactcctccagacagatccccctccgcatgatctcctccgccgcctctctgcccacatagcggtagtgccacggctcatatccgattccggtcatctcgcttttgtccgtggggtaacggagaataaatccgtattcactgcagtgttccatcagccactgttgttctgctgttttttcctggtgcctgtccaggagctgatacgactctgccacaatgtcaacagccagtccaagctgatgctcgcttgtccccggcggggcgacccatattgccgcctgcttttctgcctcttccctcaggtctccctgatccatgcaggaagcgacttttgcctcgtacaacgctctctgcttttcttctgtccggtaggaagagcatattaacggggaaagcccttcacttcgggcggcatccatcatatcctgaagctccctgaatatccgcgaatctacagattgtccatttttaagcagtgtgatatcgaaagaataaccttcatcgatcggatgtgacgcattgacgagcctcagattccatgcggatgcgtctgttcccgtctgtgcattctcctgtgtgccgctatttacgcgcgcgctgcccgccggcttttttgccgctcctgcctgagtttttgcgaactctctcgcacaggtaaaaccacagacaaatacgaacaggcagataatgatcattaaaataccgtaaaaaatcatcctcttccttctttttccccgccctgacgacgcggtcatatatcggttcataaaaatctcccctttccttcaggaatctttattacaccgatattctattaccgcactgcatcaattgaactgccctctcgcatcgtatttgcatcatcttctgaatagccaagtgaaaatgagtctgctatgctgatgtaatttccttctatatattccggcctggtaaacatatagaaaacatctgcgtcttctgtctcatacaccactatattctccattggctgcacgctcatcttctttaacgttatcccgagatactccgcccacttatcctgcgcattttcggtcagtctgaccgctgcgcccgcgccgttaagttctgtgccgatctccggttctatgctgatctcatatataagctctgtctcttcatccatgaggagccacaggccggatccgctgcactgcatctcgatataatagcagcgtacttttttctgtccgtctgtctgcgtataatataattttacagcttccaggatcttaatatcataattcagcccttctcccgtgactatgccactttgcagcagtttttcaagcccgttccccaccagtttcacaagctttttgtccgccgtattgtatgtgactttacccgatacgatctcgctgcccatccgccttgccctgctgatgaccgacagattttcgagtgtgtcctgctgtgacttctccggttttgcggatctgctgagcttttccgtctttacctcccggagcagccgtctgtcttcatagccggacagacggataggcacatagacagaggcgcccagaacggccgcaaggagaaggactgccacccaggttctgtttttcatttttttctcccttctttgtcttcccgggaagcgctatcgtccctgagacagacggacacccgcgttccctttccttcccggctcacaaacttcatccttccccggtgcagcttcacaattctggagcagagggcaagtcccattcctgccccgccctgcgcccgcgcgcgggatttgtccaccatgtaaaatgcttccgtgatcttggacagctcacccttcgggatccccttgccgctgtcctccacagagatacagtatgtcccgtccggcagcctcctgcctgtaaacaagatcctgtctcctttgccggctgcctttctcgcattgtccagcaggttcatgcagaccgtcttcataagatccggctcaagacttacgacaccgtcccggacttttgaagaaaataagatcccgctgtccgccacaaccggcgcaaacgcattagctatctgtccgagaaactcgcgcatatggaccggacggaatgtgaactcctggttttcaagcacgatcaggtccatcagcttcagagacaatgtctccagccgttttccttctgtataaatatagtccgcacaggccatacgccgctccggctccatctccctggaacggatcatgtccgcgtaaccgatgatcgatgtgagcggcgttttcagctcgtgggagaaattgtccacaaagtcctgctgccgccgcgaatactcctttaattcattcaccatatcttcaagcttcaccgacatctgttcaaagtcagaggccagctccccgatctcatcgctgcgcgcgatattgagcttcggcctgaagcttccgtccgccatctgctttgtggcagaagacagctttttcagcggggagagaagcagactggacacgacaaaggaaacaagacccacgcccacaaaaaggacggccatcaaaacggcaaatgtcgtatactgctgcctctttgcctcaaacaggtacgtgatctcccggaagctctccagatacatcacctcgcctcttgcatagatcggccgcaccgcatggatataatatttcccctgtgttttgtatatttcatatcctttgttgtctccgccgatcttgccatatatgtccctgcttcctgacaaatcgctgtttctgtagacagcggaacctttttcatcactgaccgtgaacgcgatcgtgccgccggatacattgaccgtgatattatcggcgatctccggcacctcttccttcatagacgtcagatctttaagttcctggtctaaaatctgcccgagaatatcattttcagcataggctgccgctatctcacggtccagcgacagctgaaactgcgagtgaatgagaaagtatccgcccacactgcacgtaaacgcggtgatgataatggtgctgcaaaatattttccaaaaaaacttcaactcctacgcctccagacgatatcctactttgtatacagggacgatcttgtgctccagaccgagcttcttgcgcatgcgctgaacgtgaaggtccacggtacggctgtcgccaagataggtctccccccacactctctcatagagaaagtcacggtacagcgccacatttctgttctgcgcaaacaaaagaagcagttcatattctttggcagtgagcgccaccgtctctccgttccttttgactgtgcgggaaagcgtgtccaccgtaatgtcaaaaagtgtgaccgtgcgctgcgtctttccgtaccgtctgaggaccgtctccacccgggccagcagttctgcgatttcaaacggctttgttatataatcttccgccccggatttaagccccttcaccttgtccctcacatctgaccttgccgtcaggaagatgaccggtatgcctagaggcctgatatactccagaagctcatacccgttgatctcgggaagcatgatatcgagaagtacgagatcatatctcttctgctctaccatgtccgccgcctgtattccgtcaaaggcacaaaaacagaggtaccccgcatcacttaagctctcttttataagattggatataggtacctcgtcttctacgatcaatattttattcattccagccacctcatatattcattaaaactttcccgtattaataatattatacatgattatggcatcatttttgtatcttaatttcactgctctcctgaagcagtatgtttaagcgagcctgcacttgcggtatacgatgacaaacagcgctgcaaagagtcccgcgttgcacaagatcacagccagatttccgcctcctgcggccggttctccgatcgcgccgatatagttgctgatctgctgtgaatacgcatatttggagacagcgccaacctgctcattaaaagaggcgatcataggcagaaaggagaacacgagcatgaccggcacgctgacagacacttccgtcacctgattcctgcacgtgatgccgataactgccccgagcagcagggagattataattcctgctcccataatgagaagaaaatgcaccgcctctcttcccgtatacttgcctgccagggcaaacacagccgccccgagcatagagcatacaaaaatgccgagaccgattccgagcagatattcacccgctttgacgttggccatcagaagctcccgcagcgtattcttctctttttcttctgatattatggatgccgctgccgtgagaggcgccatccccacatacatggtggcgaacagaatgataaaataccgctttggcatcccttcgatctgtatagagttctgcatgataacggaaagtaccggaaacatgacgaattgtatgagcaccgccttattcttcagcgtatccttcatctgtttcttccacaccgcataaattctcttccccgtcatgtcctaaagcccccttcctgtaagttccataaatacagtctgcagatccggctccgtagaatggatcccggccaccataccgccgcggaaatactccgctatcgtttccgcctcacttcgctcattgccgagcagaaccgtgcggccgtcgttcaagctgatctttatcttattctggtgattatatcttctgcatatttcttccggttccccctcctccacgatactcccgtcgttaagaagcgcgatccgcccgcagagctttgccgcctcctccatgttgtgagtcgtcatcatcacggctgtcccccggtctctctgttcaaggatcaggctgtggatacaggacgctgtggccgggtcgaggccgcctgtcggctcatcgaggaacagtacctccggccggtgcattagagccctcgccagaacgagccgctgccgcattcctttggaaagcttatggaccggagttttggccgcatctgcaagtcccaccttataaagtgcttcaccgatccctttctttgaaatgccgtaaatatccgtaaacactgccagattgtctctgcacgaaagacgttcgtacaggccgctgttatccatgaccattccgatccgggcgcagaccgtattgtcaggatgtctgctgtcatgacccataataaatgcttctccgccggtctgcccaagctgcccggtaagtatctttatgagcgtcgtcttccctgctcccgacggaccgagcagaccgaagatctctccttcggacacagagagactgattcctttcaggacctctttgtctttaaatctcatgcggacattttcagcgctgatcttccgttccattctcttcctcccactgccttttcattttctccagcccttcctggagctttctgttctcaagttttgtcttccatgctgatatccctgtgctcacaaaaaagcatatggcaaaaaagagcaggaacagcacccaaggctgccacatatctgccgggaaccagccaaacagaaagatgaacacacatacagacgccagaatacatgcaaccatgccaagagcccgtctccctgccgtcagtttcttaaacagtacatctgtaaaaaacacatactgcagcagtacgacgataatagaaaggacgaaaaattccagcatgatctccaacgggatccctttgctcccgagccggtacagcgccgatatcccgcgggcgctctccccaaacaggtgagtaaaaacggccatacagagcatcgtaaacccaaagataacaagcacctgcgataaataactgaatattgttcttttttcttccatagtcagatccccaacctttctttcagctgttttgtatactgtctcgacacgagaagctgctccctgttgtccattgtgacccgtatctttctgtcaatgtccgctctcagcgatgtaatgtggcggacgttgacgatacaggatttggcaatgcgcagaaacccgctctcttccagctgttcttccagttcatacagcttcatctctgtctcgtagacagattccatcgtatagaggaatgtctttttatctgtcgtgtctatatacaggatcgaggcaatgtccagcaagtggatctcgccgtccctgatccctgtcatcttctgttccagcatcctcagcatggagatgatcttttccacctccggcgtcaggtacgcacagttcaccgtgatctccgtgccggacactgccgggtctgtattgatcgttatcttcacgttgtcccctcctccttaaactacttaaactatagcagagaacgtgcctgccaacaatattgtgcggcgtaagttgcacatattatgcgctgtgtttccacgcacaaaaaagcagaaggcggaacgcagctctgtctgccgcatcccgccttcttccatatttttttatcagtaccgttctttcctgccgcggcacggatcttactcaaatccgcggatcctctccacgatcgtcttctttcccgctatcacctcatagacggccagcggaacgagcgtgcatacggccgatacaagtgccgtcattgccaatacgggcagcaccggaacgctaaacgcgatccccatgtaattcagcgactcgtaacacgcataggtgactccaagcccggctgtagctgtcagcagcagagagatacccgcaaacagcagcccttccctgatgagcatgcctttcacctgtttttccgtcatccccacactctccatgacagagagctcggtctgtctgttctgtatatttccggatactgtgttaatataattcatgatccctatcatcgcgagtatgagcgttatcccgatccctacgcccatcatattgccctgtgcctttttgaccgacttcatagtatctatctttgaatcatatgacacatctcccccgtgagggcctttttccgcaaagtcctttatctgcgcctctgtctgcgcgtcatactcttcttcatattggatgcctgctctggagatccatggatcttcaacggtcttatccacgaacgcgtcacttacgattatcacaggcgccatacctgtcatatatgcataatacccgtcatccaccataccaccgatctccatgctgtacgactgtgcgctgtcatcatactgagtaaaagcaagctttttccctcttacatcagacagcttaagcgacagatcatccctgtatatgaggcacgtctctccgttcatgaatttctctttatccaccggtttttccagcgtactgttcacataatcaaattctccctcgtcgatcccggacataaaggtgtagaacttttccggatgctgccggtattcttcaacgtcctgtccgtagctgtggtccatccacgtctcatagaattctttcatccacatatcagaaaacccgggctcccacgggatgatgatctgtgtgctcgtcatgggatgcacttgttttacaccgtccatctccctgatccctgtaataaactttttatctattattcgggcccactttgacgtgtcttcttttctcagcgtatcattggaaatgatcaggtctgaattcatgtaattggacattatcgtccgggctccatggctctcgatcattgtgacaagacagagaaatacagacagacaggctgccagggacaggatgacgataccggtctttttcttatcccttccaagctgttcccgagccatcctccacaggatattcccctttcccgtcttatgcgacggtttattccctgataccgcccggtagccgagcgcctccagcggagatacggaatccgcgatcctggcgggcctgcggctgccaaggtatatggtagccccggcgacggcaacgctgagcaggaagaccgccggatgaaaggcgacctccacctcgtcacgtatgcccatcagcttcacgactttcgggatcagaaagaacgataccgctgatccaagcaggatccctccggccgtaccggcggtcccgatcatgagcatctgtctctgtatcagcctccgtatctgctttcccgtcatcccgaccgtctgaagaaggccgtaatatcgtatactgcccgacaccgacaggtacaggatgttgtagatgagcaggtacgcgctcagacaggtcatgatgatgagtcccgcaagtcctgccacgatctgtacagacatttccaccccggatgagtaaaaaagcctttgctgctttccaagttccagggaatccctgaaatccgactgtgccctttccgtcatcagcacagatttaaaattcaggtacaaaatgccggagtttgtatcagaaaatttatatccggactgctcaaaaaatgattttgacacatagaatactttgttgtccccatagccttcccatatgcctgatatgatgaattccttcgtatgcgtgccatgtttgtcctgataagtaagcgtaaaagaatctcctgtccccagatctccttttccgcagtcttccagggcagcctttgttgccagcagctcattttcctttgtcggatatcttccctccatccgttctactgccggttttctctgcgtgttccaataagtgtcgtcgctccatataaggatcgtatgcagcgtatcatcctcgtctgtctcttccgggtaaccggcttttgcttctgtgccgatggttgtgatatctgcattctcttcacacagctgtctttgctcctttgtaaatcctccgataagaaccgcgtcaaaatccgcccctttcatccgcatctcctgacgcgtctgcatcttaaagtaagtgatgccaactgtcaatatggtaaacagaaggaaggccgacaacagaatggccgtagccatcaccgcgtttctccgccggtttcctgccatggaacgccgcgccagctttgtgattattctgccgttgttattcttaagcatgacgctcacttcccttcacgatccggccgtcctcgatacggacgatccggtccgccagctgcgcaatatcctggtcatgcgtgatgagcacgagcgtctggtgaaactgccttgcgaccacccggagcagccccataacatcgtggcttgtcccggtgtccagattaccggtcggctcatccgcaagtatgatagatggttttgaggcaagcgcccgggctatggccgccctctgctgctgcccgccggacagcgtacacggaagcgcctccctcttttcatcaagcttcagaagcttaagtatttcatccacaaactctctgtccacgcaggcgccgtccagctcgatcggcagtatgacattttcatagacgttcaagtcctgtaccagattgtagctctggaacacaaatccaactttacgtctcctgaagaccgccagctgttctttgttcatgcgggataaatctttcccgtccacgattacctgtccttctgtcggtgtatccagtccgcctatcatgtggagcagcgtactcttaccgctgcccgactttcctacaatagcggtaaacttaccttcctccgcctgaaaatccacgccgttcagtgcctttaccgtattttctccaagcttataatactttttcagatgttttgtctctacgatccatgtcttcatcttttctgtctcctttcttctttacaacaagcatatctgaaaaaaatcacaaaccgttcacaagaaagaagaatcacagacttgtgactcttccggcaatcccttattatatcccgttcggaagataaatacagaactctgaacccgctcccgcttcggaccgcacttctatatatcctttctgacgtgttatgatctctcttgcaagatacagccctacgccgatcccttcctcaccgtgcacttccggctcgcggtagaaccgctggaatacaagcggctgcctttcctgtgcaatgccttttccgctgtccttaacgcttatctttgtaaagaactcctgctccgttacgcttatatgcactgttccgcccggatctgtatactttacggcattgtccagaatattgaatatggcctcgctcgtccatttcccgtcgtgggtcacctgtatctcttcagcgcattccacactgatcttgatcccctttttcccggcggcgggaactgccgcctcagccgcacgcacgagtgtctcaaatatacgcgccttttggcactgtatctcaatgatacccgcctccaggcgggacatcttgaccattccctggaggaggaaatccagcttttctgtctgccccgccatctttccaaggaattcactgtacttttcagaatcgggagcccctgactgcagaagttccagatacagcttcatattggctacaggcgtccgtgtctgatgggatatgtcagatataagttccttcatctgtctcttctctctgctgttttcctcatatttctgatgccacatgtgatttatcttcacaagcttcccctctgtcttgccccacagtgtatcttcgggaagtccgctttctttcagctcctcccccttttccatcacgtccagactcttctccagtttttccgtaaatgtatagatgtctcttttaagctcccgcatccggtgccacataagggctgctgccgcggcaaaacagagtgcgggaatgatcacttcagccattgataccccatcccgtaaacatttgatatatatttgtgcttctcatcctcgatcttgccccgcagccggtttacattcaccgcaagcgtatgcctgtctacaaactggccgtcgcagtcccacaactgttccagcagtaccgaataggtgagcagctgcccggcattgtctgtgaacaggcgcagcatccgaaattctgtgggcgtcaccgcacattcagttcctccggcttccatctttgccatgtcaaagtcaatcttcaaaaagccgtcatcatatatatttctcccacccgtgtccgcgcgctttaagatgacgttcatctttttcagcaggatcttcatggaaaacggcttggtcacataatcgtccgcgccggtctcataaccgttgagcgcatcctcctccatatcccgggccgtgaggaagatcacagggatctccttttgctccttcatccacctgcagagcgcaaatccctctccgtcaggcagattaacatcgagcaaaaccaaatctgcacattcctgccaaaagaggcgcctggcctccttcagggaatgtgcagatatgacgagatacccctcccgctcaagggaataggatataccttgattcagttctatatcatcttctacaattaatattttctgcatagtgcacctcttatattcgatcgctgactctattataccgtcatatgagaggtactgcaattattcaataatcacaaagtcgtgataacttccgcgccgccgtaatcgctgccccggctgccgttcccgtcagtctgcccagtggtccacagcctctttgagcagtgcggcgcagccttgttcttccttgtcatagtatgcccggaaccgttcatcttccacgtacatgcgtgtgatacctctgtgcgcctcaggcgtatactgcttccaggtcatacagagccattctttgtgcagcgccgcaatgctgccggcttcttcaccgtccggttttatacctgatcggacgccttcctccagcagtctgcgtatctcgccgccaagttcttcaaaccgttcatactctttctctgtcatgttcagcaccttccggttggacgcatccacagattcatctccatacttctgacgtgcctcggccccgtatttttcttcgttctcttttaccatgttctctttgaacacttcaaatttttctttatcgttcatgctgcattctcccttcattgacgatatggtctgctttactgtccggatcagggcatccacgtgccttttttcctcgtaaagccccagaaggtgatcctccaatgcgctcataatatcaaaaccgtcctcatagagaatactccgtatacacttcaggtcaaatccccgctcccggtaaaataagatctgctgcagcaatgccacttcgtttctgccgtaataacggtatccggcctctgtggtagagagcggctttaaaagacctatttcatcgtagtagcgcagagtgcgtgcactcactccggccatgtccgacagttctctgatactatactccattttcatcatctcctccggtccaaaccaagcatacttctttacgcagcgtcaaagtcaacaataaaatgcagaacgtactattttctctttgtatggatatgactcagaaagatccatacagcaagtcccagcgccagcagatagccaaaggcacccagcgcggggatcccccacagcttcggtttcatatccgtggtacataagatgctggagcttatgagaagggccgtcacgaggaatcccatgacaagcttcttcacaagctttgtaagcatggcgttcaggtcctctgtcgcgtgcagatccagatttatccggttctgcccctttaaaaagcctctgagaaggtccgccgccagcgcagggatatccagcgccttgtggatcgagcggtatatgctcctccccccgcttttcaactcctttttccatctgccgccggccagaagattgcccgcgattcgcgcggaagccacctcgaccatattgatctccgggctgatatctgcaataacaccctccatatgcgacatacctcttgccagcatggtgaggccgtgaggcatgatgatcttattgtccttcatcacctccatcaagtcttctatgatcccggcaatgtcgatctttccaatatccgtggtcccgtacctcgtcagcagattacctatgtccgcatacaggcggctctggtccggcttctccttaaactcaccaagcgccataacggattccagtatctgccccacatcattctctgccacgccctgcacggcgcccgcgatcagttctttgtcgcgggtgcttaatcgccccatcattcccatatcgatccagatgatctttccgccccgcacctttacattgcccggatgaggatccgcatggaaaaagccgtcctccatgatctgttttacataattgtccgccagcttgctaccgacttccgccagttcgtaaccattttccagaaggcgctctttctcatcgatcccgtaaccgtcgatatattccatcacgagcacctgcccggtcgtaaattcccggtacaaaacagggacatccacgaatgcgacttccctgtttaaccttgcgaattcttccatattagaggcttcgttcagaaagttcatctcctcctgcgccacgctccacagttcatccagcacaaggtccagatctacaagtcccttcatattgaccggcggcagaaatctgaccgctttgtggagcagccctatatcgcgggacatcgtgtcatagattccctgcctctgcactttaacgacgactttctccccgctttccagcactgcccggtgtacctgggcgatagatgccgagccaagcggcgtgtcgtcgatctcctgaaacacttccccgagcggacacatgtaggaggcctcgatcacctccctgacctgctcaaaaggcatagggcttacgtcggagcgaagccgcatcagttcatcacagtaccgcttcggcaaaacatctgaatgcatggacatgatctggccgagcttaatataagtaggtccgagatcttccagtatgagacgcagcttttccggtgtgacgcctctggcgatactgtgctttttcaggacagacatgatctccttaagccttgtcccgtattctgttgatgtttccttactcatttgacgctccgccgctctttccttcttccgggccttcctctgtcatctcttcctcagattttggggctgcttcctgttccagcccttcgagcagttccttaagctggcttatctgctccggcgtcatcttgtcaagcagctctccgagctcttccggcgtggtcggttttacttttaccgtgacattatctttcactgccttttttacattgtgcttcagttcttcattgagcaccttgccctgttctactgtcagttctcccttttttacaaggtcatccagaatttcttttgacttctccgccgttgtggccaatgcgcctactcctgccagcattaccttttttaaactttcacctaagttatccattctcttttctcctttctcctgtcaaatcataactatcacctatcatcctgcatatctcttcatccggcacagttccgtcaaggataatagagttccaatgttttttattcaaatgatatgccggcagtaccgacggataggtttgccgccacacttcggcccattcagggctgcattttacatttacccatatatgcccttctctttcaaaaatccaggcaaatacttttctgttgtctttgtgcctgaccacgcaccagtccgtgtcccggaacggatagtcctcatagacattttgaaaagccaggcagtgagagattacttcttttcgttccgtcatgcatccacctcctccgtcatttcagagcaaacagcgccagtatcttcgggccgaatatgattcctccgatgacagccgctgtcatcgcggctatcaataccgctcctgccgctgtgtccttggcgatcctggcgcgccgcctgtgctccttcgtcacaaggtccaccacagcttccaccgctgtgttgacaagctccagcgagatgacaagcgcacacagaataaggcagatacaccattcagtcacagagagcttgagcgtgattccaaatacgaccaccagcccgagagccgaataatgtatcatcatattccgctctgttttcagcccggttataattcctgcaaacgcatactgaaagctcttaaggagcggattgatctccgcctcactctgcccccggccgggtatcccttttgcaaaataccgtctggctacagacgtatatatgataaggtagatcattcccgcaaggaaacctcccaggacgtcggtcgcatagtgtacgccgagatagatccggctaagagcggtcagtacgatcatcgtcagacaaataaccgtaccggctgtcttataagtcctgctcttcttcgtctgccatatgaggaagagaataaacccatagaaactggcggccagcatagcatgtccgctcggaaaactgtatcctgtctctgcgatcatctgctgtccctggggcgggcgctcccgcatgatccaccctttggcagccagatcgaggagcacagccagaacgagatttacaaagagcgcaatgagatactgccgctgcctgagcgtgtgtatcatggccatactgataatgagcagcaccacaggatgtaccatattcgtcatcactttgaaaaatccggtcaaaaacggacaccgaagtgactggaccgccgtgcacacagctatatccaccccttccaggcggtagcttccggtcacatctccaagaagaaggacaaaagctgccagtcctactataagcactgccagcttccatatgtgaattgtattgccgcctgtcctgacttccgccatggtatcccacctttagagttttataactttggttttattataccactctttagcggaaagaacaaaagaaagcggttattttacgatctgctatttatacagctttgccttgcccgcggtgccgagaagttcaaacttatgaagcgccactttcttcatctgtgcaatgcacggcatgtatatgtcctccggctctctcaaatacgggttttgcagcacctctctgcatttctggtaaaacgcgtccttgacatcactggatatattgatcttattgatccccattctggacgcctcggctatctcctcgtccctgtttgccgagcctccgtgcagcacaagaggtatgcctactttctcctttatctctctcagccgttccagttcaagtttcggctgccttccttccggatagataccgtgacatgttcctatggcgacagccagcgtatctacgcctgattcctcaacaaacctttttgcagcctccggatctgtataacgtatctccgtactcgtcgtcgattcaatatcctgattcgtcgtccctatcgtgcccagttctccctccaccgacactcctaccgagtgggccagttcacatacctcacggcagatgctgacattttcttcaaacggccggctggaagcgtctatcataacagaagtatacccgcaccggatcgcctttactatctggtctttgcgtgaaccatgatccatatgtatgcacacaggaatatgtgtcttatgtgcctcctcaatgactgactttaaaaaagattcaccggcaaattccagttcatccggatgtatctcaatgatcatcggcgcgtcagcctcctctcctgcttcaatgagcccgcgcagtatcatgctcgtaggcgtattgaaagccggtatcgcaaaacagttttcattcgcggccgataatattttttccatattcattaacatgtctttttcctcctatctaagattcatcgttctactcaatgtaacaataattacatatattttatatataatgtaattatattttcataaatatattttgtcaaggattttaatatctaattttccaacactttacagctgttttataaagcatttcctatgtttttccattatttataattatttttcttttgttataatgtattatatttgaaaatttatttttatattttatatttttattgaaatttttgtttatcaatactataatatagtaaactgttaaccgtttatgccaagggaggaatttccatgacgacaggcactattttcgacatcaaagagttcgcgctttacgatgggccgggaatcaggactaccgtatttttcaaaggctgcccgctgcgctgtacatggtgtcacaaccctgaaggtctctctttcgcccctcagctgatgacagcagtaaacaattgcatacactgcggaaaatgcaccgcggcctgcccgcgcagcggcatggactgcaacgcctgcggatcatgcgtcccggtctgcccgcttcatctgcggaaaatatgcggagacaaatactcttccggggaactggccgccctcctgatgagggacgcagatttcctccgcaaaaacggaggcggaatcactttctcaggcggagaacctacatttcagtccgcttttctgctggaactttccagccttatgcccaccgttcacaaatgtatagaaacatgcggatactgcagcgcccagatcttcacatccgtcctcgacgaaatggatcatatcatcttcgacctgaagctggcagaccccggcatgcaccgcagatacacaggcacggacaacagaccgatactggataatttagaactgttaaagaaaagcggacgtccgtttaccgtcagaatccccgttatccccggcgtcaatgatgacgacgccagtctggacgccgccgcgcgtctcctcaaaaacgcaccggcgcttgaccaggtggagctgctcccctaccacctcacggcaggcgcaaaatatccaatggtaggtcttgcttatacgcccggattttccgtcagcagtaacccccgcctgaacacagatattttcaggcaatatggaatcccatgtacacatttataggaggctgttcatatgaaaagcaattatatccaaaaactatatgattattttatcgtcaacaaatcccacagagtgtaccgccagccagccgaggacccgtacaggcaggccgggaagtggtcgcggcagggcataagcgacacagcgcgggcgtctctccgcctcagatatgtgctggaacacgaaaaacccgtcgtactgcccagcgaaaggatcgctcttttaagaacttttccgacggtccccgagcttcacacagaacaggaagacaaacggctgagagcccagtttgcttttcacgaaaacggccgggtcttcaacatgtgtcccgactatcaactgttcatggaagccgggtccggcgccgtcaaagaaaaaataaagcttcagatgtccaaaagcatcacaaaagagcagcgttcacttctggacgcgatgctggactccctgctgtgcatggaggaactggcagacagataccgcgcggaagccgcgtctgccggcaatgctgtcgtagcagaaacttttgccagcatcccccgcaatccgccccgttcctttcttgaatcactgcagtttctgcggctgcttcactatacactctggtgtaatggtaattaccacaatacgctggggcgcatcgaccagtatctgtataaatattaccggcttgatctggattccggcagactgaccaaagacgacgccctggaattactggaggaattcttcatctcctgcaacaaggacagtgatctgtatatcggcatacagcagggtgacaacggccagaccgtcgtactgggcggatcggggccggacggaacagacgactacaacgaactttctgaactgtgtctgatcgcaagccgggagctctgcctgatcgatccgaagatcaatctcagagttcacaggaataccccgctcgaaacatacgaactggcgacaacactcactcaaaaaggacttggcttcccacagtatacgaacgacgagatcattatccccgcccttctcaaatggggctatgacaagaccgacgcttaccggtatacaattgccgcatgctgggaaatacttattccaggttacatggacctcgtcaactgggacagtctctgctttccgcaggcggtgagcgaagccgtggaatgtctggagtcgtgcggaggctatgacgattttgcccgcctcgtacaggaaaacattgtcagacaggcggatgtgctgatgaaatctacggaaaacgtttacaaagagccttcgcctttcctcagcctgctctgcccggactgcctgaacgaaatacgggatatatccgctccgggcaagtacaataattacggcttccacggcgacggcctttcctgcgccgcagattccatggcagccgtccgcagatatgtatttgacgagaaactttttaccgctccccagctcatcgaaatgctgcacaaggatttctcaggatacgaggccgaacagaacatcctccggtacgaagcgccaaaaatgggcaacaacgatgattatgcagacagtatcgccgtgcagctcatcgactcgttcgcagcggcactggacggccacagaaacgacagaggcggctgcttccgcccgggcacagcctccgccatgtactacatctggcactccagaaaaacccctgccacagccgacggacgcaacgccggagaaccattttcctgtaattattctccttctttatacgcccgctgcaaaggacccgtatctattataaaatcttttgcaaagcctcacctggaaaaagccgccaacggcggtcctctgacactagaactgcacgactcttccttccggaacagagatgccttacgcaaatgtgccatgtttgtgaaaagctatatggaactcggcggtcatcagcttcagctaaacgccgtaaaccgggagcggctcatcgacgcacagcggcatccggaaagctataaaaatcttatcgtcagagtctggggatggagcgggtatttcgtagaactggacgaagtataccaaaaccatattataaaacgggcggaaatgactttttagacgtttttcatttcaatatgattcattttgatgtaaaataaatatggatataatttccaataacatttaaggaggttttcttttgaattctctaactaaccctattctggccacaaagcttcattacatgcatttcaatcctgccatgaggaggattgccgatatattgatcaccgacacacaaagcctgctgaactgttcgatcggtgacattgcagaaaaaagcaatgtcagcgccgcttctgtgacgcgttttgttcagatattaggttataaaaacttcaaagcattccgtcagagcctgcaggaatacctcctcgccggccaggaccagctttctgtcacatcatcggagatcgccatgtctgagtcatccgcgccggaaagtatatgcaattatgtcatccaaagcgaaatagagatgttgagagacactttatccctcatggattttcctactatggataaagttgcaaagaaaatctgcagcgcgcggcatgtgatatttattggggaaggccgttcctatatcgcggcccagagcgcctgcaaccgttttgaccgtctcggcatcctgtgcagctgctacggagacccccacagtatgctgccggccatcggaatggcgcagccggaggatctcatagtcggcatcagtaattttggccattcaagacctgttgtaaactgtataaagtacgccagagaacacggcgtcccgaccgtagccatcacaagctcccaggactctcccctcgctcagcaggcagagtctctgatcatcaccgggttcaactacaacaacctcgcaaaccagggcgagatcatctgctacgagcccatgtccgagaatctgccgcagttttctctcattgactgcctttacctgatcgccggaaactatcagagcaaagaacgtgtcaaccgttattacgaatgcacccgcctgatcgaagcagagcggatatagtgatcccctttacacaagcgcgggataaaattttacatcgcttcagcaaaaaaaaacggttcttccctgatgaaagaaccgtttttctaataatatatcacatgatcggatagcctgccgccagatatatctcataccagtcctcataggacagttctacttcgcatgccttgcagcattctttaaaccgctccgtcttcgtcgtcccgcagaccacctgcatatccgccgggtgacgcaggatccacgccaccgcgatggtcgttttcgacacgccgtgccgctctgccaccttttccatcgccgcatttactttttcatatttcggattatcgataaacacaccgtctataaagccatactggaacggagaccacgcctgcagctgaatctctttcagcctgcagtaattcaggatccctccgtcccggtccacagcataaaagtcatgattgttcgtggcgacaggctgcacgcacatatccgcatgcacaatgctgaactgcatctgattcacttcgatcggtacgctgcagtatttctgcatcagttctataccagtagggacctcgttgctcacgccaaaatggagcacttttccggattctttcatgatctcaaaggcttctgcgatctcctccggtctgaacagagggtccgaccggtgcagcagaaaataatccagatggtctgtcccaagcctttcaagggaagcgtccagcgtcctcagcagatgctcttttgaataattatgaaacggacgtccgtccgggtaaaatgtaatacccccttttgactgcagcacgatcttgtcgcgcagtcccggatatttccggaaggtctgcccgagcagcgactccacgccgccttccttttccccgtaacaattcgccgtatccacaaagtttgtgccattttcaatcgcgttttccagaaggttttcaacctccgcctctttcattccctcgatccgcattgttcccagtataattgagggcaatgcctctctgcttttattggccgatactcttttcatcctctgatcctcctcttcttttttatctgttcatcagcttttgaccgccccggccgtcatgcccgctataaagtatttctggaaaaacagggcaattacgatcacagggagcgaaccaagtatgctcatggccatgatatcgttccactcaaatgcgtactgccccatcatggaagctattccaatcggaaccgtccttatcgcatttgtcttcgtcagtgtaagggcataaagatattcattccaacattggataaatgtatacatccccaccgagaccattcccggaacggacgacggaacaagcactctccacagcgccttccagtgggttcccccgtcgatcagcaccgcttcatccagctctttgggcatcgtgttcatgtagcctgtcatcatcaaaatcgcatagggcaaagtaaatacgacataagtgagcacaagcgcaagctggctgtcatagactccgagccttacgatcaatatgagatacggaatcagcagcgtgatcggcggaaccgcctgcacacttatgatcaccgtattgatgatcttttttcccgggaactcaaaacggctgaatccatacgccgccaacagtgcaatgaccagcgtacacagcactaccactgcggcaatgccgtatgaattaaggaaaaacctcaccttttccggatcgcccagcacggacatatacgctcccagactgaagcttccgtctatcagcttcggcgggtgggcaaaaatgttgacgtttgacttaaacgaactggacagcagccagaggaccgggagaccggaaaacagcgatgcggcaataagccctgcccacaatcctgcttttgtatgtacttttgttttcactgctaactcccctttctattcccttctcgtctggttcctcacatagaataccgccagtatcacacaggcagccagaatgagcacggcggcagccgacgcctttgcatattggaagctctggaacgcagttttatacacataggtactcatcatttccgtcgcgtgggccggtccgcctgccgtcaaaagccagatgagcgaaaaattctgagttgtccagataaaatccagcattgcaatgctgaccagtattggtttcagctgcggaactgtgatatagaaaaatctctgccgtgcatttgccccgtcgatccccgcggcctcgtacagatcatccgatatcccctgaagtcctgccaatatacttatcatatagaaaggataccccgcccatatgttaatgaaagtcagcacccacaaggcggccgaacggtcgctgagccattctaccggttttgctatcacgcccagaacagaaagcagataattcacgactccatgcgaattcagcagcagtttccacaggatcgcgatcaccgttgcattaaacatccagggcagcatgaacacgatacgaaaaactgcctttgctgtttttccaagacatctggcattgatcataagagcgagggccatgccgatcgccatatggaagactacatttatcaccacaaatatgaccgtattttttatcgatcttgcaaacacagtgtccgacaaaatggcgctgtagttggccattcccacccaggcagggttatctgtcacgataacattgtcaaaaaaagaataagagatcaccatgccgatcggaacgaacagaagcacgagcagcaggatgcagacgggcgccacatacgcataaggatatattccttttatctgccgtcccggcaaacgatactttttcaacattctgctttccgttttatcaaacataagtcatttatcctttccgttatacttacaggtccagcgtcaggaacctgtacatttgcaaaggagtcccgcgcagttcctgcgcggaactcctgcctttcagttcctttccttattcataggccgcatcaaactgagtctgaacttcactcagcatatcgtttacatcgtcataatcgccgtcaaagtacatgaccaacccgtcaataaacgcgctcataagcgcctctgccgtaggcattgaataatactccgccactccattactgttcatatatacatcgtatattgccttaaacgcatccgaatcatcttcatactgcggctctgcctccgagttggccgggaacgcgttggcatggatacagagatccgcatttactttcggagaaagcaggtactcgataaacttcgcagcttcttctttgtatttgcagttttctcctattcctaccgcccagttattgacacggacataactgtccccgctgtagtcatccttatgcggcatattcatatatgtaaagttcatgtccggagcctgttcacgtatattggacatatgtgccacagaatctgcgataaacgcaactctgccgtttgtaaattcttctactttgtcagcgtcagtcattgtgtatatgccaggagaagtgacttttgcgtcaatgagccccttcaggaattcacatgtgtccgccagcacttcattgtctgctataaacggttttccgtcgtccgtcaggatagaacagcctgaattccaggcgaaagcagtcagatattctacgctggtcgcattatccgtactcatattagaacagaacccgtacacattatcccccgaatccgtaactttttcacaagcttcctgaaattcagaccacgtctcgggcagagtgtcgacgcccgcagacttgagcagatccagattaacggccatcatagatggaaagttaacgatcggctgcgcatacaaagctttgtctacctttgtgccctccgcaacgcttttcgcgtcaaatccggtgtcctcatacagcccgtccagctttgccagcagcccctgcttcgcgtagtcatagatccagccgccgtccagagccacaatatcagccatcgtgcctgccgccgcgcttgcctccagctgagtcttcgtatctgcataaggattgctcaaaagctttatcttaattcccgtctcttcataaaaatcatcacagatactctgcagatacccttcttccatctcattgtcaaaccactgctggaattcaagcactacttcagaatccccgcctttttcatctccctccttctttgaatctccttttccatccgaaccagaaccacaggcagccaaagaaaataccatcaatactgtcatgaataaagctactgtctttttcatcatctcagattcctcctaatcttctcatacgaatgtgcaaacctcttttctttgttgatcatggtattttcaaaaccggttttttaccttgatactacttataatgtaattatattttcttatatttgtaatgtcaagtaaaaataacacctgtaaacatatcgttgctttttgatttttcagctattttcaggcgttttttcttgtatcacccttgtttttaattgcctataattttaatatgttaatctttatatgaaaatttattttatttttattccaaaattttattgattacattctttatatggattataatagttgtaaatatacttcccaaaaaattatataaagaaggaggttcagatatcatgcgacactatattgccatgggatttcagaacaccgttgatttcgagctggaatgggatccggatatactccattcacttattgattcctaccagattcatgaatcagagatctgctgtgatgtacaaatacgatcggaacgggatatcatcatagcactgctcggttatatgaggtccggaaccggaggggaacgcttcacattgtcagattcgatcgtccgttcttttgcagaccgcttttcctatgagatcacattaggcggcacccctgtgcgcgccgcagaatctatggggcgtctcgggtaccgctgctgtctccacgcctgcagcttcaaccgttatttcagggatctcgtctctccgaccgttgactggataacaagtgtgccggatgagggggatgcgttccatcctcatgtcatttttcagttccccaaaggagcgcatataaaaggaaatgatatcgattttaccgttccccgctccaaccgggccatctttgactacgacctgccaagcaaacgactcatgatcaatgaagatttccgcgcaatgataaaagatgccaaggtgtttctggcagccggttataatgtgatcgaagataaagaagtattaaaaagaaggctgaatacgaccatacagatcatggaagaactttccccggaatgtatcactttttacgaggacggcggacacgaagatatttccatcggtctgcttacgatacagactcttgccccgcatcttgatatgctgagcctgaatgaggacgagcttcagggatacgtacagcaccctgtagatataacgagtgctgaagaagtagccacagctgtaaaagaaatgtacgaacaggcgaaggttccgcttctcatctgccactccgcctattgggcgctggcatatggcgtacagccccgaaacgtgcaggaagccctggaaggcggcatctggatggcatctacaagattccgcatcggcagcaggttcacagaacaagattacgaagatacaaaagcgattccggcaaggcactccagcatcggcttctgccgcaggctcacttcactgttgggagaagaacgactattgtgcctccccggactggatctggaccacgtcggccgtcctgtgacaatagggctgggagacgcttttatcggcggctttcttccgggactgctctcggaagaagagcaaaagtacataagaacagacagaagtgcaggaaaatatcaatgaacaaaggccgatgcagtattatctgcaccggcctttgccgtttaccacagtgcaaacgcacgtctcaacgtctccacatctcttttcattgcctcatagacatccctgcatcctgatttaaatgccggcttccggtaaaaattttcaatcatgagccagccttcatatccacctctgcaaagtacctctgcggattcctcaaacccggtctctccctccccaaagcatcggcatccctgtacatccgcaagtccttctttaaaatgtacttccgcaatatcagagacgtccatctgtctcaattcctccgacggacaggcaccggcaaaatactgagtattctgtgtgtcataatatatcttaaatgatgctgatccaatatagtctgccatatccttcagctttttcggagaaagcacggtttccaccgctacggtcacattcttttcctctgcctctttacagactgtccgcagcatttctgaggcattttcaatatctgcttctgttctgagataaccatcccagcagcagggcagcataagaaggggtacattcatctccacgcacgtacggattcctgtcctgatcgccagaagcgagatatccccttccggagtaccgagacggttcacaagcccgccagcccttgaaaaaccgttacagcccatggatgcgatctccatcccgcacttctttgcttcttctgtatacaaatgctgtattcttttttctgccatcggaaagctctgggaatagcttccccagtcgtcgatctgcacaccgtctgctccaagtccggctgcaatagcaaatacggaaggaccttttattggcatcacccattcgcagaatcctattttattcttcatatagttccccctgttctgtttacccagtataaaggttccctgccttccagcacatctaatattccctgtgccgtgcaaaggcttacttttctgtatgcctcatatgtctctgctccagtgtggggagtgcagatgacgttgtcacacgttaagagcagcgaatccgccggaagcggctctgtctcaaaggcatccagcgctgcccccgccaggtatccactcttaagcgcctctgtcagcgcttctgtatctacaaccgcacccctcgcacaattgaccatacaggcaccccgtttcatctttgatatcatagctttatctaccagatgatacgtcgcagatgttgcaggcagatgtacgctcagtatatcacttctctccacgacttcctccgcggacacaagtcctacattatatttctttgcgtattttgaatcaggatgcaggtcgcaggcaatcacttccgtctcaaagctgcttaacttctttgccaccagttttgcgacagcgccaaatccgagaagccccactgtctttcctttcagttctcctcctatgtaccgcacccactgtccctgacgtataccctcgtaaagcggcagtatattccgcagcagctgtatcataaagcctaccgtaagctccgccaccgcatttgaattctgtcccggcgcgttgatcaccttgatgccgtattcctttgcagtatcacaatcaatattatctgttcctactccgaactttgctatcactttcagcctcggagccattcgaaatacttcttccgtccactcatccagaccgacgacagcagcatctatatttcccaccacttcggcaagctgctgaaacgtataataaggcagcgcactttcattgatcataagttcatgtccccgggattccagaagctccctggcatctgcacagagctcatgataatgagacgctgtgatcagtatttttcccatctttccattcctttccatatcaaaaaagtttcagtggtatgccggcatcattgcagagtatttccagcctcttctctaatgcctctgtctgctgacgctccagatcaagctgcggacttctcattccacccacatcgatccctcttatcttaagcgcttctttaaaataagacatattgctgccgcaccggagcgcgtcacaaaatccgacacatatcttctgcatcttttgcgcctctttcagccttccttcactgtacagcctgtacaccgtgacaaagggctccggaaatacgccggctgtgccggacacagtcccttcgcatccaagtaataccgctcattaaatcagttccctgataacgtatacatatcaacggcatcttctccgtgactcgccgcaaagatcctcgccgagcgtttaccacgcacgactgcgatctgtgcggcaccggttccaaagtcgcagtaaacgggtacaaataccggcttcttttttctctccacacggtaaaatgacagcgccttatccccggcacggcttcccccaatgatatacagttccccgaacagttctccggcccagagaacatgtccaaactgtaccggaagttccccgatacagcaataccgctcaccctgccgtctcagaaaacggatgcggtctccgtgaaacccctgtattgccgcgatctcatcattaccgtcgccgtccacgtcttccagccatacatcgctcgtctcccctgccttccacagtcttgcagaccacgttccggctttgcacagatgcaggatgccctctgcagcccctacaaatatatgagcacaactgttatcttccttgatatacattccatgattcttcgttagtccctcatagagacacgtcagtgatacaggacaacctttcacgtattcccctgcatatacggcgcccggatgattccagtcctccacgtatgccttatcattacataatgttgacgcaatgagaaatgtctttccatccccgttcactattccgatgcggtgcacatacggcagccggcaaagctctgttttatctgtcgtgagctttccatcccgaaaagccagcactgtcttgcagacagctgcctccttagaatcatacaccggataaaatccttctatggacagtaccgcctgctcctctttcagcggcacaagcgacatcactccgcccggaccgttccagacggtaaagcattcttctgactccgggtcaatgagaaggcaggtgcctcccctgttctcggatgccgccatacagaactctctcccgtcaacccgaaccgccgtaactgcatataccttctccaggtgagcaattcgttttttccgaatctccatatcttcctcctcagacgttcacgtccctgtccagaacctgtttcaaaaaagttctgcagtctctctcgttaataaacggatttgtatccgccgggcacctgcactcgaccgatacgccatacatctcttccacgggcagaacagctgccgcatccgccaggatcccggctccgcaggagacatccagaaatcccggctctcccatctgcatatgccagtccccatacccatccagttccggattcagaacagcgttggccagatggatatgtcccagatacgaagccgacatacacagagattctttcagacgttcaccattcagcgccgcatgtgcgctgtcccatgacagcaggcactcattgcgccccatgtctgccagtctcaccagccgtacagcttcgtccgacggaccgataagacggtttttgtgcgcccctctgtccagtggttccaaaagaagtttcattccggggtacttttccacctgctccagtaccgactgaagaacttcctccagtccctcactggcttcttctctgaacttctcccccggatccggtccgctgaccatggcgatccggtcagcgccgctctcagccgccatatccaccagttttttgatcttgtccgtggttttcctccttacctctctgtctgcagccgacgggttgaggccgggcgcggacaggtcgctggttatccactgtgtgaatccgacaccgtaccggcctactatatctgcaagtctggatctgagtctttcagaatggagcgtgcctgtctccagccggcggtaataaccatcgtccagtattttttcgactgcatcgagcaaaatctcctctctgtccagatatggataaaaacattcagacgcaagaagagacggataaaatctttctgacaacttcaaagtgccgcctcctctctttccagttcctttatgatcctctgtctcacagcttcatacgcttcattctcaagcagtaccggatgctcctcattcatttcaaacagatacccccagtttttcttctccttgtacttcggaacaatatgtatatgcaaatgctccgaacagtctccgagaatagcataattgatcttatccggtgagaacaggcgattcagaatcacggctgctgtgtacatttccctgcacagctgtgtgtattcctctgccgttaaatctgtcaacttctttatgtgctgttcagctgccagtatacagcgccccggataggtctgatcacggtgcaggtacagtgtgtgtctcttcacctttcttatcctgataagatccggtccgccctcttcgcagtacatacatctcatgacatgtcccccctgtcgtctgttctctttctgcttcctgccagtttcctctttatggccggctggatgaacggatagaataccgccccgaacgcgatgatcagcagcgccagcgatatcggatgctgtatgaagatcagcggatttccattggacattacaagggagcgtctaaaattgttttcaatcgtcttacccaatatcattcccaatatgatcggcggtatggaaaagtccagcttcagcaggaaaaatcccacaaaaccggcgattatcatcagatacacgtcgtaaatgttattgttcagggcatatgttcccacgaagcagaacacgaagatgatcggcaccatgagtttattcggcacatttacgatcttggaaaacacgcggattccaagatatccgagaatgcccatcgcaatattggcaataaacaggccgatgattatcgtatataccttgtccgtctgttccacgaacagcagcgggcccggcacgatcccctgaaccatcagtgccccgagcatgatagccgtgcaggcgtctcccggtatcccaagtgtaagtagcggtatcagcgctcccccgcacactgcattgtttgcagcttccggtgcagcgatcccttccggcacgccttccccgaacctttccgggtgccgcgaccatctctttgcctcgttgtatccgatccacgaagcgatatcgccgccggtccccggtatagctccgataatagaaccgagaatgctggaccttaaaatagtcttccatatagcctttagatcagcctttgtcggaagcacacgctccagttttccctttactttctccttcacctttccatactgttcctcaacagagataagtccctgtgaaagagcaaaaagaccgatcagaacgggaacaaaattgattcccccggtcaaatatatccggtcaaacgtaaatctgtacgtaccgtttatcgtgtccattccgatagtagaaagaaacagccccagaaatgctcctaaaatgcctttccatatggatctgctcgatacgcttgtcacaatgctaagaccaaagactccaagcgcaaaatattccggtgcactgaacttcagtgccactttcgccagcagcggggctgtccacagtaacacaaaggcagaaaacacacccccgcagagagatgcagtcgtggagattcccagagcacgccccggctgcttaagctttgtcaccatcggatgaccgtccagacaagtggcggcagagttggccgtgccgggtgtattaataagaatcgctgttatagagcccccatatatggctccgcagaaaatacccagcatcatcagtatgcctccatatccatccagcgacaatgtaagcggcagcgtgaccgacattcccatgactgaggacaaccccggcataacacctacgaggataccgatcaacacacctccacatacgcaaaacagatgatatggctgcatgatatttaagaaaacatccacaaaaacactcatttgatcccctcctttctctacataaaaaatgccctcggcaggactacatgcaggccgactgcaaatattacatagatagccgcagtcacgccgacccctcctgccgccagccatatcccccgtttctctcccagtgtgaacataaccgccgggacaaacaacaatgccgctatgactagcccaagatactgcaggccgatcccgaacaatacgatcagcccggataatatatatactctctttattccctgtgatgtatatacgataggggggccgcttttttcctctttcttgataaacgtctcagccaacagtaccgccgatacgatcagaatgcctgccgctatgacacgcggccagaaaccgctccccggcgcgcctgcatagtatttgggaaattcttttgtgaagtaaaaaatgcccgccgccagcatgcacatgagaacagatatgccaacattatactttttcatggtcgctacctccacatactgtttaagaggcagggaaccggaaatattgttccgtttccctgccgtctgcccgcctttgcgcaggctattccaccttgatatccttgcagagctccttataaaaagcaagctgttccgcgataaactcctgtgcctcctctgtagtcatcgggatattctgcatattcagctctttcagcgtcgtctgaaattcctctgatttgacagcttcgccaagcacatcctccagatagccgcaaatctcaggatctgttcccttgtatgcagagatgaagacccacccgagaatctcaaagtctacatcaggatacgtctctttcaccgtaggtatatccggccatgcttcaatccggtcgtttgataatgtggcaatggccttcagcccgcctgcctccaactgccccatcgccggggaaagctgagtatatgtgccgtctatatggccgccgacaacagctgtcaccgcatcgctggaaccatcgtaagatacttgtttgtaatccaggtcaaaataatctgccacagcaactgctgagagatacggagcggccccgacaccggaatcccctatagagacttctcccggatgtgctttcacatattccacgaactcttccatggtgtcataaggggcgtctgccttaactacaagggcatacgggtcaccgatggaacacgccagcggcacaaaatcttccggcgacatgtccgtcctgccaagcgcatagttgattgccagatcaacattgatacagccaagcgtataaccgtctgtctttgacgtagccacctggttcagaccgacaagacctgcgccgccggtcacattagaagccataaaatttacgccggaaggaagctttggtcccgccgcgtccagcgccgcacgcacagacaagtccgtaggcccgccggcggaaaactggatgattgtgttgatgttctgctttggataatccagctctgtcccttcttttttatccggtgaagcatctttctcttctttcttcccgcatcctgccgcgagacttcccaccattgccaaaataagtacgaatgataatatttttctcataattttccctcactgtcctgttgaaaccatcaggatttcgctaaaaatccaccgtcgactgctatcgtaaaaccatttacataatctgaggcgtctgaggcaagaaatactgccgctcctgctaaatcttcgggtctgccccatctcttcatcgggattctgggcgccgtctctgccatacgctcgggctcactgcgcatggccgccgtcatgtctgtctctatatacccgggggcaatggcattgatatgtatcccgtactgtgcccattcattacacatatgcatagtgatcatccttaccgcagcctttgaagctgtgtacggtatcactttgatgccgccctgataagacgtcatggaaccgatgttgatgatctttccgcctcctccctgctttataaactgccgggccacccgctgacacataaagaacaccgccgtgagattgacatcaagcacatcctgccagtcttcttctgtcacatcgatcgccatggcccttcttgtaattcccgccgcattcactaaaatgtcaatccgtccgaatgcttccagtgtctgccttacgatcatgtccggcgattccttctgagccatgtctgccctgatgttcagatactttcgtccgagctgttcaacccccgctctcgtcaccgtatcatctgagcgccctacacatacaatatgtgctccggcctgcgcaaggcccagggcaataccctgtccaatgcccctggtagcccctgttacgatcgctacctttccctgcaggtcaaaattaccgtgtgccattttgtttcctccttttgatttcttttttcttttaaatgtaaacgtttacttttttatgaaataatgatatcatttaaatgtaatgctgtcaaattgtttttgaacatatagtaacaaaaatttttaggtattttacattattttccattcctctgttttcatttcttttttcagcatatataatggaatcagagaaaaactaagtatagtaagaggagacctgtatatggttacattaaaagatgtcgctaagcgggcgggcgtcagtatcgccaccgtttcaagagttatgagtaattccgatgctgttgcggacaagtcaagacaacgggtgctggaggccattgaagagcttggctattattccaacgaactggcacgcggactccggcaggaaaagataaatgccgtcgcggtcatactgcccgacatttcaaatccatttttcgcagatatgctgagaggaatcgacgatgtcctgtcaacatgtaattactttatcttgtttaacaacacggataataatataaaggtagagaaaaaatgtctggagaatatgcgttccatggctttatcgggcgctctcgtgtactgctgccacaaatctctcgacgggctggccgattcacttccggccaactccgataccgtgttcctgtcaggaggcggtggtctgaatgcagacaatatccattttctgtctttcagcagaaaagagacggcatacgctgccgccagacacctgtatgacctgaaacgacaaaagcttctgctgcttttaagctcgtttcagcaaaacgacagcgattttattgatggaataaaaaaagctgccgaagaaaccggcggcagttactgtactgcatattcctctgtcaatgaaaaggatgcatcccgcgtcttttcctgcgcatacagtaatgaacatcctgacggagtcatcacggaaagcgatattcaggctatgggcgtgctgtcatggctgcacacgaatgaaataagtgttcccggagacatctctatagtaggactcggaaactcctcactggcacagtgcacacaaccaagactcacctcggctgctccttccggctaccagattggtatggcgggagcaaattatcttctaaacttcatccaaaaggacagcggaaattttctgagagacacaaagacgctggagcaaatgctgcttcctaatatcattgtaagggggtcgagtaaatggtagaacagacagaaagaccggacatattgactcttggcgtgctgaacgtagatgtcgttatggagctcagccacaagataataggcgggaaaatcatcggaaatgaaatatctctgaatacaggaggccacggctgcaaccaggcgatcggcatcgcaagaagaggcgtatctgtcggtatcctcgggaaacttggagaagacgccttcgccgtccagatcaaggacaccctcgcaaaagaaggagtctgcttaaatctgcttctggacgctcattctactaataccggccttggaatcattatggttgagaaggagaaaaagaatacttatatcgacttcctcggtgcaaattatcagatgactccggaggatattgattcttttgaatcctatataaaagaatgtaaaatggtcgtcatccacctgggcttttcaacttacggcgctgcactgcggctcatagaactggctaataaatatggtaagacagtcgtcgtgaacccttcttcctctactgatatggaagaggcgctgttaaagcagatcgattaccttgtcctgaactacgcaaaagcgtcaagtctcctggatatggcgatcgataatctgaagggagcacgtgtagccgccaatctgctgctgaaccagataaaaaaggctattttcgtccagatggatgaccagggcgttcttgttgccacacaggaagaattcactgttcttgacgcctattcggtgtccacaaccgcggatatgtccggtgtcacggacttctttacaggcgtactttcagcggaacttgtaaacggcgctcccctctcctttgctgccatcaaggcacaccgtgccgccatgatatgtgccggcaaaatcggtgtctatacagcattcccgacaaaagaagaaatggatgcaatataaaaattcccctcagtcctgaggggaatcactacttaatgtcactgttttataatcatgatgcaccgcggccagaaatttcccgaagacatcctctgtgcgaagcttcaggcttgacgtatttacgcacgggtgacatcccacatactcttcctgcagaatttcttcatctacaagcagctgcactgagcagtccgtgtcatatataagacccatgacagtcgcggagccgggtgccacattcatatatctgaccatatcctcccctgaggcgaaggagagcctggatgtgggaatctgggcggacagttctttcgtccgaagcactttatgtcccggcagcatgagcagataaaaggctgtcttctgccggttgcataaaaacagatttttgcagatcgtaatgccaagcactttatctacttccagacaatccgcgatcgtacccaccggtccgtggtctgtcctggaatactcgattccaagcccgtccagcacatcatacactttcatttccttatcttcccgtcctgctgcacaggcgggacggccgttctgtaatatcataacgtcatctcctggtatatcgtcagtgttaactattatgattttactctaaaactatacagctgaaaagaaaattttgaaaaaaacattgttattttgtccgcagtaccacataattagactatactctcgtgtctttgaaaaacatgtcgttatgaacactggtaaaaaggatgggaaaggatggttttatatggctgaattgatcgctggggcggtctttgtttttctgactgttatctgttttatatacggtatttccgcctggaattacagaggtcctgtactcatgaataaatatttgcttgcttccgctgaggaaaagagagctcttgcaagacagcctgaggaagagaaaaaggcggactaccgttatgcggccaaaatctccttcggtattgcctttatgtggttttttgcttttctcggcataatcgcagacctgcgtctcatatggatctccgtcctcacggcttttgttcttgctgtatatgcgctgtccgaactcttcaggaacaatcggaattagcggttgtcctgtgcatccttcttcgaccgatcagaagagtaactgccaatgtgattatatccgccagtaaaacaatggggaaatgcctgacggccccgcccagaaaaagcagtgtaaatatctctacagacagcgctgcaaagcacaaaaagtttgtgatataattcgtcaggctgtcactgtagacggtatgcgtatacagccatctccataggaacggacgcagaagaaatctgatcacaacacaggccgcgggataggcgaatatcgcttctctgccggctgtcgcgctgacggttcccccgctccactggacggggatctcagacggcagataactgtaagaaaagaaagcggcagccatgcttaacacaagcagaacactccatacgaccgtaccaccccaaaggtagagaaaacctgcgcagtccgtccgcaaaacattcggattctctttccactgctcttccagatcagtcacataacgctctacgtccaaatcatgaaaatggatctctttctccttcagcattgccccgcacagctttctggcgctctccatgtccgcgatctggctgtccagtatcttcgcctgtcttttgacctctttagaaagagaccgctttcccttcatcagctctctgatcatctcaatcgaaaatccaagcgttctcagatacgcgattctccttatgttctctacatcgcttctggaatattcccggtagccgtttgaactgtttctctgcggaacaacaagtccttctttctcgtaaaaacggatgtttgaccttggaagctttgttgcctcttccgcttcttttattgtcatataatatcaccttcttcttgttcagtataaagtataaacagggtttacagtcaattaaatattacattttacgaatcacagaaaaaaagattgactcacacgcaacgtgatagtgtaccatatagttatggaagaacacaggatatatgccggcagaattctgcgcttcttccttaactctctatgataaggggctgataacgatgaaaacaataagtcaggttgccaggctgacgggaataagcacacgtactctgcagtattatgatgagatcgatctgttaaaaccaagtgagcttacaccgtccggctatcgtctttacaacgacgaggctttacagaagctgcagcagatcctgttttttaaagaactggattttaaactgggagagatcaaagccattctggaggaaccgggctttgataaaatcaaagcgttcaaaaatcagaaaaacctgctcaaattaaagcgggaccggatagataagcttatcggactgctgggcagactggagaaaggagaacaatgcatgagttttaaggaatttgacctgagtgaatatattgaggcattagaaacatttaaaaatgaaaaaacagacgacgtcatcaaatattggggaagcgttgagaaattcaatgaattcatccgtaaaataagggaggatgacggacacatggcagaactagcaattaaacaattcggcagcatagagaaatacacagaggccatgaagtataatctggagcatttttcagagctgatggaacaggcaaatgaaatcgccgaaagaaaggatgagatattacagcacagcgatgctctgttcacgaaactgacgtccgacatgaccagagatatcacttccgaggatattcagagcactgtccgggatatcattgagttttcacaggagaacaatatgggaatcgatatgggtgacggatattgggatatgatgatagaaagctatacccatgatactgtcagggaaatcaacgataaaaagtatggcgcaggcgcctccgactatatcgccgcggccctgcggtactatttccacaaggagcagccctctgaatagagggctgctccttatcccaacacctgcagatcatccggataaatatttctggccagaccaagatccgggaacttattcaccttagactttgaagttttaaaacgtactttttcccccacgtgcagatccgggaatacaccacgccaataaaacagccagtcactcgccgcttcttcgccatccggaggctcggctatatgtcctttgatcccgtagcaccggtagttttcttttacctgacggacactgctgaccgttgcctcgtaatatcccaggctgtccttttcgatcacatactctcccttcaggaagttttctgtctgtctgacaaataccggcagtctcttgcggaattcattcgtctggtgtgtttgactgatcccacagtcatacagttcatcatataccctgctcatatcgtcctctgagtataatttccgcatctccattccttgaagcggtgtatccgacaagtctgcataggaaacgagcagcagcggaaaaaactgcttactcattccccaggccgcccccatctccgtgagacaaaatttactctccagatattcctctgtgatcagtgaaataacagcctcacactcctgtagtttttctctgatcttttctataaatgtttctcccgtaacaaaactttcggaatatgctgtgcagaatatatcagaattattgacccccatgcccatctgcaaaaattccagaaaacaacttaccagcttttcattttttgaactgtagctaataaaaatctttgccatccttttcctccttcagtatatcaagcagcttctgtctttctttttgataagattccgtcagtctcttctgttcgctaaaatatctttccctgttctgtttgagctgcttcccgatcactttcatatgctccttatcatattcaggcactttcatcttcttaatacttgcattactcaatatccgtatggtcgtgcctgactggatccgctctaacgccagctgtccctgtccggaatataaatattccaataaaatatatggatcatactttctttcgtctacccgcagcagcgtaatattcccactgataaacgcaggaggcggatttgcgccaactacagccgccttaataaccgacccttttgatgtcaataagatatcatcttccctgacgcggaatttttctttgtatgccggatgtccctcctgtatccgctcagctgtctcataaataattctgccgtcctgtatatcttttatgttgataaagcaggctgtccctttttcctgctctgcaattttagttaatgtctgtgatcctctgataatatcggctatatcttctaccgtagtattactgtctaatctttcctcttctttaagctgaatgtactgtattggtttaaaagaacatgtatcggcgtcaaggtctgtgcttttcagcataacactaatgccggacagttccgttccgtgccgatagcatttaccggcaatgtaaattccctcttccgttacagcgcacatattccttttttcgtttttataataactgctgatgtctataaacaagattttctcacggcgttcgggacgcttatttttattaaaaatcagaagttccgttccaattcccatcctgggatataaatttgacggcaaggtgatcaccgcctccagccagtcacttaacacgatctgctcccttaaccctttttcattcagacggatcaaggctccggaagtcgctaacacagccgcgcgtccctttacattcagcctgtacaaagcatcctgaataaagatccagtccgaataaatatgctgcttgtcaaaatgtatcagcctgtagtctcttctgtcatatgtctctgcaacattgtttccgcggggaatatccataacgatcaagtctgccagttcttccaccgtggatcggggcagtgccagcaagtccgttttaacgatcctgccacgttcaacaccgtgtaaatataaattgatgtctgcaatatcacacagcacaggctctacttcaataccacagaatgtcagcgccggattttcccgggaaagtttatgatacagagttaatccgtaaagtcctgttccacagcacagatctaacatatgcttcgcctgactgcccaaaagcagttctgcgaccagcttctggacgctggccggagttgactgatatgttccgctccatccttccaattccagcactgcctgcagcagtacatccatcctttctgttattccctctccttttccacaaacgccgtttctcatatatgtggaaatataatttcccacatctcccagtatacgctgtatctcttcatcattctcaacaaggacccagtccactttctcagaaaatcgatgcacagctactttaaaatcataatcataaacatcctcaaaagacattttaaaacttttttgtgtaaattttccgctatatgctatgcctttcatacaacggcagccttctgaaaaaatcagcataacaaataaatagaacacctgctccgaaacgatcttctgctgtaattctttccagtaccttccaatcagactttccatatcgccatccaccttatgatatgaatatagcattgtacagtaaaaatgtcaattatgaattccaatacataaaaatataagccagcattattccttcaaaagccggcagccctgctttctacagatgaaacatgatctgtatcgcagtccctatcccgctttcactctcaataaagaatttcatattgctcccaaacagcagcttcagcctgttataacaattgtaaagcccaatatgttccgaatcccggctgccttttgttgtcagcagattttcctttatactgtgcagcttgccggcttcgataccggtcccgttatcctcaagcgtaatgacacatccgtcttttactttcgcacaggcaagcaatacctttccaccctccggtttgtccagaagaccatgcttgatcgagttttccactaacggctgcagaagaaaaacggaacttcgatatccagaagcccgggatcacattccagctcatattcaatgcggtccccaaaccgaatcttctgtatcatcagaaaattctctatatagttcagttcctgcttcagcatgaccgttgacttcacgtccaggagactgtaacgcatcatgctggcaaatgaatcgagcatttttgccgcggtgtcatattctttcatggataacagtctggagatcgtattgatgacattaaaaataaaatggggcgtcacctgtttttgcagcgcgtcaaactgcgccatcttcagctgatgcttcagttcgatctgctgcttctcataaagcagtaacttctccctgttggctgccaggtcctgctggatctgcgcgtaggcaaatttctgcagaatataattgcatatacttgcaagtgaagctgtcgtcgcctctatctgctttctggacaacaccttgatttctttataatactcatataactcttccgaatcagaatagtccacccggcccgagatctggtcggccggatacccctccatatcctcacagagtacctgccctgccgtgatcgctccaaagcactggtttttataaatgagaggtatctcaatattgatcagtccggcatgacatacatagatggacggtttcttcgtcttcagtcccatttctactgcctgtagattagatatctctcaataatgggccgtttccgggcgctcattgatacatcggcagaatctggtgaaattacttccctctcccagatgccgtccgttattgtcgacaaatacgactccgaaccctgtggaaaacgcaaaaaactcttctatttccttctggaattcttcttcgataatacagtgcagatccgaaaaaatcatatgtccctgttctcctttcgcagctccacaggcgtctttcctgtatgcagtttaaaaacccggttaaaatgtgatatattggaaaatccgcaagctgatgcaatctctttaatattcttatcagaatgtctcagcagctgtacggaatactctatccttttctgattgataaagtgtctgatcgtcataccccttttctcatgaaagagatgggaaagataggatggggagaaatgcacttgttcggataatgttcttaaagaaaggtcctccgccagatgttccataatatattccgccaccggctcaatacagtctttctcacacatatccggacccccgtcagcctccatcggagacgacgccgtactctgccgcttcctgagacacccttccaatgtccggaaaatctcttcctccgaagatggtttcaataaatatgcatccagatgatattctactgcttttctggcaaactcaaattccgcataagctgtattgagcattatgatcgtatccggcaatttttctttgatgatgagcgacgcctccagaccattgcatacaggcatgctgatgtccataataaccacatccggccggtacttaaacgccatatcaacagcatcacggccggtcagtgcattatcaagcacccggtacatccccggatgcttcaaaaacatatcccgcagatatctgtattcgatctgctcatcttcggcgatcagtatcgtgatcatgaaaccgtcctctctctcatattctgcttatattgtaaatgatgtaacattaatatttattcaaaaataattataacacaaaaaaagcaaaggatatcaaaaaatatgcatatattgacatatttataacgaagttttgcataatttacgtgaacctgctctgtctatagaaataatacatttatccggttaaaataagcccatctgatataaaagctttaaggaggaatactatgagagtaaatgacagacatgtatcattctattacgaaaatgatatggatatgggcgggataaccattgatccggcaaaaacagcgctccttatcattgacatgcagcacgtgtttataacaaggccggctcctgaggatccgacggaggctgaaaaaaacgaagcgctccgctgggaaccgttctacaaaaagattgacgaagtcgttgtgccaaacaaccagaaactgctggaatgcttccgtgaaaagggaatggaagtctgctttgccaagatccagtgccagaaaaaaaacggaagcgaccgttctcttgaccagaaggcgaccggatacaatgaacttctgcttccgccgggcacaccttccgccgagatcgtacctgcgctgtctcccagggaggacgagatcgtggtgactaagacgacggacagcgcgcttaccggtacgcccctcagactctggtttcacaacatggggatcgacactgtcgtagtcacaggagttctcacagaccagtgcgtctccggaacggtcagaagtcttgcggacgaaagctttaacgtatggctcatcgaggacgcctgcatggcatccacgcagagaattcaggataacgagctggagatcctgaataacatttactgccacgtcatcaataccgaggaactgttagatgcattaaaataaaggaggttcattatggctcaaccaaaattcaaacgaaaccttagttttatatccatgatagccctggcatccggcgccgtgatcggcggatggctcgccgaggctccctattggttttccgtcaccggtgcaggcgccgcatttattttccctatcctggccatactgctcgtgccggtgggccttgcttttgcagagctgacggcgatgcttcccttcgcctcctccgttgacatctggacgaccagcgcctttgggcataaggccggatgggcttcccaatggatgatgtttcttatacaagtagtggaacctccgatgatggcatttattttcatcacagcgttccagtattttattccgatacccaaaggagctcaaatgtggatcgccattggcatcgtcctgctgtggtacatcctgtccaactttaatatcgccttgactgggaagcttgccaatatctgcttcttttcaatgatcatcatgtccctcatcgtgagcatgaccttactgttcagcggacattggtccgcagataaccttgtgggacacggcgggttcttccccaacggttttaagggcatatttattgccatggccgtattttcactgaagttcatcggatttgagatgacgcctaccatgatagaggagacgaattttccggtgtcaaagatgtggaagatcatactctccgcgctgtttgttccggcgatcctgtattttatagttgtaatggccatcggcggtatgggctcctggtcagagatcgcacagatggggatgccagagcctgaattcatccgtaaattctccctgcccggaatcgtggccatcctggctctcgtggccggcatcctccatgcattcaccacactgatgggattctggacttcttcggcaagagttctttacggcgcagcgcagctcaaccagctgccacagatattcacccgcctgaataaaaaaggccagccatacatcgccaaccttgtggtactcatattcactgtattcttctgcatcttcagcggagatgactgggtacagtacatatatgcggtatcctgtatcgccgccggccttgtatactttgtatgctgtcttgacgccctcatactgcgcaggaaacaccccgaatgggagcggccttataaagtaccgtgcgccacagtcgtattcatcctcggcatgatcgtatcggtctgggttatcatcggttcctgcctggagctttccgcaggcggctatatctccctcgtgatctattgtcttatcgggatcgcaatgtatttcattatgtccggataccgcaagaaaaatccggaggcgcatcagctgatcacactgacgccggatgatattgaacacgaataaggaccagcgtaaagcataagagccgccgcagcgatttacgatcgctgcggcggctctctctttttctgatccggccggaactatattccccatatcccgcggctatactcctcaatggtcctgtccgaagagaagaatcctgccctggcgatattggcgagcattttcccggtccagcttttcctgtctttataatcttccagcatctgttcctttaccgcgatatactctttcaaatccagaagcgtcataaaccagtccttgctgaccagctccttatagagcctgcagagattttccgggtctccaagctttatcatctctttgcttatgataaagtccacaagcccttccgttaccgggtctgattcataatattcccgggcgtcatacccgtttgtctcgtacagacgtatcacgtcctcactgctcttcccaaagatataaatattatcgctgcccaccagatcgtggatctcaacattggccccgtccattgtgccgagcgtgaccgcgccgttcagcatgaacttcatatttccggtgccgctcgcctccttggaagccagtgatatctgctcagatatgtcacaggccggtatgagcatctctgctttcgtcacattataattctctatcatgacgacctttaagtacggcgccacatcagggtcgctgccgaccagttcctgaagacagagaatcagatggatgatatcctttgccagagtataggccggagccgcctttgctccgaaaatgacggtgaccggtatatccggtatcctccctgccttgatctccttatatttatagatcacatacagtgcgttcatctgctgccgtttatactcgtgaaggcgcttgatctgtatatcgaatacggacgcttcggaaatgtcgattccctgggtcatctttacatactctttcagccgctttttattcacctgcttgatctcccaaagacgttccagcactttatcatccccggcaaaggcgagcagtttttcaagttctgacgcattctttttccagccgtctcctatgagctctgtaatatagctgctcagatctggattgcagtgcatcagccaccggcggaaagtgataccatttgtcttgttattgaatttctccggataaatctcataaaatggcctgagttccgatcgtttcaggatctctgtatgaagggccgccacgccgttgacgctgaagccataatgaatatccatgtgtgccatatgtacccggccgctccggtcaatgaccgccaccttctcatctttgtaagtctctttcacccgttcgtccagctttcggatgatcggaacaagatgaggaaccaccttttccaggtaagagaggggccacttttccagcgcctctgccagtattgtatggtttgtgtacgcgcacgtcttcgtgacgatctccactgcctcatcaaaggagattccccgctctgtcataagtcttataagttccgggatgaccatggacggatgcgtgtcattgatctggatcaccacatgatcgtaaagcctgtgaaggtcatatccttgttcatccatttcctttaaaatgagctgggcgccgctgctcaccatgaaatactgctggtagatccttaacagctgccccgcctcatcactgtcatccggatacaaaaacagcgtcaggtttttacggacatcttctttgtcaaatgcgatcccatccccgaccatactttcatcaagcgactccacatcaaagagatgaagcttgttgatcccgctttcatatccgggcacatctatatcatacatgaccgaagtcagcgtaaaatccctgaaggacaccgggaaatgtaccccggtgtctatgagccagctctccttttctatccacggatttttcatttctttctgcttatgatcttcaaagatctgccggaacagtccatagtggtaattcaggcctatccctgccccgtcgagtcccagcgttgcaatggagtccataaaacatgccgcaagtctgccaagccctccgtttccaagggacggctccggctccagctcctcaatgcccgcaaggctcctgccattttctttgagaagcttttgaatctcatcataaatcccaagattgatcagattattggataataatttgccgacaagaaattctgccgatatataataaacctttttattcccactgttttctttcttttgtgaactgatctcttttgtcagccctaacagggcataataaactgccgcgtcctccgcctgtgcaagtgtcgtgcctaaccgttcttccaatttctgtttaagatccatatctctaactgtctccttctatactgtctccttttgtactgcctttttctatttttacagaccgtccgtacacttctgtaagcttccgcatctttccggcaagtccgggcgtaaacgcgccttccttcattctccatacccagttgccgccaagcgttgagggagtgttgatcctcccctccctgccaagaccaagaatatcctgcatgggaatgatacacgtatccgccacgcttcgcatggcaagacagatataatcccagtgtatctccctttcatccgtcccccggtcattcaggtatgtcagcgccatctccttatcttccggggcgagcgcttcataccagcctctcagcgtatcattgtcatgggttccagtatacaccacacaatttctctcataattgtggggcagataatcgctttcctcccgtgagtcaaaggcaaactgcagcaccttcatgcccggatagccgctgtcgcgcagcagctctcttacgctgtcggtcaaaaagcccaggtcctccgcaatgatcggaaggtctcccagttcctttttgaccgcatgaaataattccatgccgggcccttttctccagcatccattgactgcatcttcatccttgtaaggaatagagtaatactcatcaaatcccctgaaatgatcgatccgcgtcacatcatacaggcggaagcagtggcggatccttctgacccaccagctgtagccggttttccggtgatattcccagtcatataaagggttgccccatagctgccctgtggcggagaatccgtccgggggacatcccgccaccgctttcggaagcctgttctcatctaactgaaataaagacggctgcgcccacgtatccgcactgtcaaatgccacatagacaggaatatctccgatgatctgtattcccttatcatttgcatatgctttgagcgaattccactgtttgtaaaattcatactgcaggaactcaaaaaatcccacatcttctttcaatgcttccctgtattgtgccagcgcttcgggaacacggaatcgaatgtccttatcccagtggtcccagctcctgccgccaaacctgttttttaccgccataaaaagcgcatagtctgaaagccactcttcttctgtcttaagaaacgcccggtactcttctgtctccgtcagtccctgcccggccgcccggctgcaggccttcttaagtacctgaaatcttgtctcatacagcctgccgtagtctatcgtctcttcactgccgtcgaaatctgcgccgtcacagtccgccttatccagaagcccctcctccacaagggtattcaggtctatataatatggattgccagcaaatgttgaaaaggactgatacggggaatcgccgtagctggtcgggccaaggggcaggatctgccacagcgtctgccctgcttcctttaactgatccacaaattcataagcctcttttgaaaaacacccgattccataaggggagggcaatgccgatacgggcatcaatattccattctgtctcatttttctgctttcctcctgatcgctatttagccttttacagctccagcagccacacctttgataatgtgcttctggcaggacagatagaagatgatgaccggaatgaccgccagaataagcgctgccatgaccgctcccatgtctacccgtccgtagcttcctttcatatactgtatcgcgatagatatcgtcttatatttgttcaggtccagcacgagatatggaagaaggaagtcgttccagatccacatcgtctccagtatccctactgagatatacgtcggcttcatgatcggaagcaccacactgaaaaaggtacgaagcggcgtacagccgtcgatcatggccgcctcttcgatctcaagaggaatggactttacgaacccgcagaacatgaagactgcaagtcctgccccgaagccaagataaataatgatgatcccccacggtgtgcggagtccggtgcggtccgccaccaaagagagggtgaacatgaccatctgaaaaggcacgaccatggaaaatacgcacagcagatagatgagtttcgtaaacctcgatgtgatcctcgtgatataccaggcacacatggacgtacagatcaaaatgacaaaaacagaacctacggtaataaagacagtccagcccaccgcgctgagaagctcatatttatctatcgccgtaatatagttttcgatgcctgcaagtgtctttgaatccggaagcttaaagggctgcttgttgatataaaccttttctttaaatgaattcatgagcacaatgagtatcggcagaatatagacaacgccaatgatcgtaaatactcccgttcccgctaaacttaaaggactttttctggttttcattactgctgcacctccttagaacgtgttgcgcgtaactgtatcattccgatcgctacgactaacaggaagaacagtacggccttcgcctgaccaacgccttcccatccggttcttccatagaatgtattgaagatattgagcgccatcatctctgacatcttggcaggttcgcctgctgtcagtgacaggttctggtcaaagagtttaaatccattcgtgattgataagaacatacagatcgtaatggacggcatcatcatggggatcgtaactttccaaagcctctgccagccggtcgcgccgtcgatctgcgccgcctccatcacatctcctggtatggactgcaggcccgcgatatatatgatcatcatataaccgatctgctgccagcttacaagaataataagtccccagaagccataccattcattcagggccagcgctgtgccatattttgacaggatcccgttgaagatcaactgccagatgtacccaagcacgatacctccgatgagattcggcataaagaaaaccgtacggaatatattggtaccgtgcatctctttcgtcagcgccatcgcaagcatgaacgcgatcacattgattatgatcagagatgccactgcaaaaagggcggtgtaccagaatgaatggcggaatacggtatccttcagcgccttgatgtaattggagatcccggcaaatttcgcgtccgtgaccgtcgtaaacttgcagaatgaaagccagatccccataatgaacgggatgatgaagccaagaataaacgcacagaatgtaggaagtacgaatatcggcatgtaacgttttatggacttttccataaaaaaccctccttccaaaaaagcggcgtggggaatgaatacccctgccgcttcttatcttctattaaccttctactttgatgccgccgcctctttggcccatccgtctacaaatgcggtcacaactttatcccaatttgcatctgtctggtctgccgcgtaagcggtaagtgcggaacctaccccgtttttccactcttcagaaggcatggtagaaaagttccaggataccggagtctttccttcttccagatacttatttgcttcatttacaagcacgttgtcagattcaagatttgccttgaacgggataacgaagcccatatctttgcacatcgcctcaacgccttcatcagatgtcacacaccacttcataaagtcaagtgtcgccttaatatcatcctcagatgctttggagtttacacaccagtaattctctgtgcctgtacaaacaccctggtcctcctcgcctttcacaccgatgtagatcggcaggatcccaagattgtcttctccgacatctgcaatgttgttgtattcccatgttccattctgatagaatacagcttcctctgtcacaaagtctgccgtggcatcatctgctgttttcgtggagatctctgtcggcgcacatgtttcgttgttgatatacagatcccagatctgacggtagttgtcaaggtatgtccctttgatggcgtctgtactgtcaatgccctcatctttgtattcataatagatcggaagatttgccaggtgggtcttgaatctccagtcagaggagccgtccattccggcagatgtaaaggctgagaatccaaggctgtccttattctttgtgatatcctccactactttcttaaagctgtcaaaattcgtaatgtcatccgcagaatagccggcttttttcaataattccttgttgtagataatgccgtaattctcgatcacataggcgatccctgacattttgtccccgtccatcagtgcaaagctgtcatcggtaagctctcctgcgatgtcagagtctttcaggtcatagcagtaatccttccagcttgcaagtccgaccgggccgtttacctggaacagcgtcggtgcgtctgtctttgccatctcggattttaatgtcttttcatactctccggatgccgctgtaagaacggttacaggaactcctgtctcatctgtatacttctttgccagatcctgccactgctcatccgcttctggtttgaagttcagataatatacttttcctttggcatctccgtctttcgcctttttgtcactggagctgctgcatcctgcagccattccgactaccatcgcgcatgccagcaacactgatacaacttttcgcattttcataattctttccctcacctttcttaaaaacgctttcttttattatgcccttatcgtaccagaatataggcgaaaagctgtaacaattaaaaaaccttaaataccaaaaaatatacttttcatcatttcatcaccgttcttcttcaaactgccttatactgtcatcctccatccgtgtaaattcttcttccgttatctgcccttttaccagtctggggaggtattccccaagtgtctcctcctgcagcagtgaattccattttacctggtaattcggcacgatctgggggctgccgctgtaggctgaaatataatcctgcatcatctgctctgtccccgccgtctcccccttcaaaaatgtatctttttcctttttattaaatcctgtcctgaatttcagaaattctattgcgccttcttttacgctgtcactgtagcctgacacgaccgcccacccgaatgtctcgggagaggaaataagtttattccccggaaatggcgaaaaacgcacgctggcggcaaactcttccgggacctggtccatcatccaatatccattcggaaccatagccgctttccctgacataaaattttcatacgatacgtcaaagtccgtatgcagggcatcctctgtcgtataagaaaaaagtctcttcagcgtatgcgcaagcctaagtccgctgtcattctgataactgtccggatacagctcatccataaatgcggcgccttcctccgagtcggcaagctccgccgtggcgagcagcatcggcgcccaggccgtaccctccgtatgcagggcaaggggcgtgattccatgcgcctttagctgctcacagcaggcccagaactcttcccacgtacgtgggaattcccggatccccgcctcttcaaataaccgctcgttccagaacactcccgaacaggagaaaaaagctgtgctgaccggtgagagataaatatcgctgtccggctcgctgcacgctctgagcacggaaggttcgatcatatccttccactctttgtccgcgtcaatatagggcgccagattctcaagccttccttcctgtaccatcatctcatagaaggaaggcagcatcctgaggtctgtgatgactgccggaagcttgtctgtcacattcagccgtttcagattcttgcggtactcttcctccgtctccaggatccattccacgtccattttgtatgtcccctcataggcatcgttaaatgcgttcaccacatcttcctcattcttcgtgcctgagcttgggtctacggtaaggatcatgggaatacgtatttcttttttcgtctcaccgcccgccttctccttattttgtgcgcagccggccaagccgaacagtaacatgcccgctaaggctgccgacagtattttcttatatctcattgctctgtttcccgtcccccgggagcagtatacagcactttgttccgtcttcctgcacctcatatccaaaccccacgtcctctccatatttcagccgaagccttgtcataatgttgatgattccatagccatgctctttatccgggaagctttttttcagctctacgataggtacctttaaaagggcgttgatcttatccaccatctcccggctcatcggtgtcccgttattaaataccgtcagggaaagcctgccctgcagttcctttacttcgatccgtataaatccgccgtcaaacatgtcgttaaacccatgcttgatcgcattttccacaaggggctgcaggatcagtttcagtatccaccgcttgtctgcttctacctgacagtcgatctcatagttgaaaagatctgcatttctgatctgctggatttccatatagctctttacgttctccagctcgtcagccaccgtcactatatcatttcccttgctcagggacaggcggaggtaactggacaacgcatggatcatcttcatggtgacttcttctccgttcatccgtgccagcatataaatggtgtccagcgtattatataggaaatgagggttgatctgattgatcagcacatgcagctcacttgtgcgaagctccttctcctgctttttgatctcattcaaaagctgttcgatattgacgagcatttcattataagaatggccgatcttatcaagctctgtatccgtgtgtatgtctaccttatggctgaaatccttgccgtcaaaattctccatctcttcactgatcttctggatcgggcgtgtaaagatacgggatacatagaggcttactcctaccgcaatgagcatgacaagcgcatagatcccgatcaatacaagaagaatctgactcagtcccctgctcaaaacggaatttggcactattgtaaagatggtaagcccgctttccttctgccggtatgcctgcagtacgcctccctgcaggcgcagtccgcctgagacaatgcctgactttccgctccccgccagacttacgatctcctcccggtccggctttgtcatagaaaaaccttccggatagttctgcatacagaaggttccgccgctgtccacgattccgaccgcagcctcctccatcgattcctcatcttccaccagtccctgcaggaactgctcattcatcttgaaaaacaacattcccggcgcatgggcataatccatgctgcgcacatatctcccaatgaacaacgctttctccccggtgccaaacaatgtgtccccggtaaaaaaccattctgtcctggcataatctcctgaaagccggtctttaaagccgctctctttaaaatcttcgtacgatatattggaataggatttcgtatatacattttccttattatctacatagcagtattccgcaacatgttccagatcgatataggcaaaatatttactgagggcgctcttctctacattttccagcccttttgttctgaggcttttctgtacactgtcatctgtgatgcactccgctgtcacatcgtccgtttttttatacaaattgtcaagcgatatccccatcttctcattcatgaactcatacttgtccacaatgacgctcgtcatatttttgcgcacgtacacccacactccgatgcttgaaagcagtaatgccagaatgagaagggcaagtgtgtgcatcagatattttttttgaattcccgatgttttcctttttctcatgcctcatattcctttttatattcactgggaagctttcccgtatattgcttgaacaaatgagagaaataagacggattgctgatcccaaccatctcacatatattcccgatgctcgtttttccttcctccagaagacgtttggctctctccatcctgcatttcatcagatatttcttaaaggtcatctgaaaggtatttttaaacgcccgtccgaaataaaccgggttcagatatacgtgggaggcgacagacacgatagacaaatcttcctcatccagatgttcttctatgtatgccactgcctctgacatatattctttaaaatactttgtctcattgctgtatgcattatcttttctcttttcaatggcgctgcataagatcttatagcagacgtccaccgctctggcagcgttaagcttctgaaggttagagtaatagtttttaaactgctttttcaattcttccgtcatcccgtaggaatcctcgatcatcagctctgttttcagcatgactttatgcatatactggcactgctgctcttcctcctggggaagcccgtagataaaatagataaatgcttctttcagctctttttcatcgttccttctgacagcatttacgatcaaaagctctgtatctaccgcgttcgttctgtctgtcctgccatccatatcctccggtatggtaaatgcgctggcccctgacatgcgcgctatgtcaaagagcttccttgcctcctcgcagctcctttttattcccgtaattcctttatacggctttgagatagccgcaatcacaggatgttcccttacctttgccatctcaagtatatctttcagttctccgaccgctctgttgtcctttgtcttgacaataaagaggtatgtcccctcctcattttccattttccagtaagggaaaagatttccgatattttcttccagaagctgcatcatggcaaaccgcgccgcctcgtagttcagagagtttgtgatcttatacgtcaggtcaacgtccgcgtatactgtaataaaccggtcgtccttctcaagacctgcttccagcgtgtcaaatactttctccgccttctcgaccggaatccggttctggacatatttctgcactacaacctggagaaagctgtccgagtcttttacaagaagcttttcccagttatcgtatttttcttcatttctgatctgctccatgcacacgttccaggcgccccgcattgtttccatgagcttctcgtccgcgatcggttttaacaggtaagcgtaagcccccaggtcacacgcctgctgtgcgtactcaaaatccctgtacgcgctgagtacaacaaacagacagtccattccaagattttctatctcttccatgaccataaggccggatatctttttcatccggatatcagtcagaactacatgaggccgcttttctttaatgacctctatggcctgctctccgttcctggcgcttcccactacctcaaagcccatcccgttccagtcgaatgttttaaggagcccctccagtaagattggttcatcatctacgatcactaattttaataacttcatatacatctccatttttatcgtttatcgcccgcagcttctgcattggcttgactatctctatcataacatatgcccggccgctttcacatgttcctgaagtacaaaatgcgccggctcacatattcttgtccgggtcagagaggaatatacccatatatcctttacagatcagcgtccctagcagcttagacagctgcgcggcagacattctgtcgtcatccatgatccagtttttgatgacgcttgtccccccgcaagtcgcaaagagatatgctgttttttctgcgtcgggatctgcgcttccaaagctgctccattcccggatgactgcctcatttgccgcaatcattttttcggagaacgcacggtcaccgtgttcgccgagcagcgcacggaaactgtctatatttcgttctacgtagcggaggcatgtgcggacagaatcaatcacctcctgcaggcctgtctcagggcttagattctggaaacgtacgatcaattccttcagaatattatcttcaatttcttccagaagttcatactgggtgtcataatatgtatagaaggtgctgcggttgatccccgctgtctcacacagctctttaatgctgatcctgtccatgtcttttttctgaagcagttcgatcagggcttgttttagaagttcgacagataatctctttctcttatcatctttcatttttaatctccatttgccgataattttctaacaattccaacaattgagttcacatttgtctaaaatcatacataattctgatatctgatggtatacatgcaaagttattatatttataattataatataacaagtacatagtgtgtcaagttgttcgtacaggagggaacgatatggaaaagaaattagacaataaagttgtacttctgacaggtgccagtaaagggctgggaagagaaatggcggtatatctggcgtcggaaggagcaaagctggcaatctgcgcccgtacacgggatcagctggaagagactgcaaaaatgtgcgcagatgcaggcagtgaagcggttccggtagtctgtgacgtatcggaaagagagcagcttcgtaattttgtaagcacggcggcagagcacttcggcaggatcgacgcattgatcaataacgcggcttatacatattctaatgcaccgtttctggaacaaacagaggaggatctgctgaatgctttttcctcaggtttattcgctgtctgggattctatgaggttctgttttccttatatgaaagaaaagggcggggccattgtcaacatactttcggcgacctatgcagaagcgatctacggtgaagcgtcatccaatgccgacaagggcgggatccgttcactgtccatggccgcggccagagactggggaagacataatatacgggtcaatacaatagctccggacctcagaaagacattttatgaaaatgtacctgaagagtttaaggactgggttcagacaagagaaactcatttcgctacagcggcgggaatagaagggaatccagagagtgttggtgcggcggccgcttttctcatctctgatgattcacagtggatcaccggacagaatatcacggtggacggcggccggtgtatcctttttatctgacagttgtttgctgcctggtatccgatcgatcaagtaaggaggttaagaatatgtttgaagatttaaagggaaaggttgttctgctcactggcgccagtatgggactgggccgccagcaggctatttatttttataagcttggaatgaaggtttccatttgcgcaaggcgggaagaaaaattgctcgaggttgtgaagctgtgcaaggagacaggcgcggacggtgagatcatggaagtgccatgtgatatcagtaattatgatcagttaaagaattatgtggataaaacggtggagcgttttgggactatagactttctagtcaacaacgctaataaagaagctcttcttatgccacttgacgaacagccggatgatatactgaaaaaagatatatttgtgggatgtatggcccattggaggctgatgaagctgtgcgtaccttacatgaagggaaagaaggcatcgatcatcaactatgcttccggcaattaccagctcggaatggacgggatggcttcttatgatgcggataaaggcgcgatcagagggctggcaatggttgcggcgagggaactgggacagtacgggatccgtgtaaatacagtaggtcccgcggcggtcacagacaccgtgctcaacaacaccccgccggagtacagagactgggtaatacgttgttcttcctgcaattctctgcgccgtgtcggactgccggagacggacataccgccggtagtggcatggcttatgtctgagacaagcggatgggtgtccggacagaatatcaatatagacggcggctcctgcatctatggaatgtaagagctaaagcgccgcgccttatctggccgcatgtattttacgtataacaaagaaaaagtggaaaagctttgctataagcttcttccactttttctctctcttgtctgtatcatctttttttctttgtcttgtagcctttgcctgtgcgtctgcgtccatccccatcagaacacctgcattacaagcctaaaagtatcgttcataaaaggttttttcactttctttccaatatcttaacttttctgtcacatttaatagtttaatctcttcagccgttctgttttcgcccccctttcttagtaaatgttttattcagtttaatttctgtcggtataatcgtaagtgccataattgctatctggataaaaaccaaataaactatccatgtctcaaaatctgaccagtctttaatatatacaataaacgcaaatgaaagcactgccaatgcaatacctgtggtaaaatttattttcccccaaagtttatgagcataagaccacgtatcttgatttaatcttgacatagtgcttcggtatcctgacagtccgttcctgtctgccggtggttttttctcccaccgtttacctaatacaatcatagaaattggaactaatagtgaacaggcaagtaaaaatgcaaacattctaatacctcctcgtaaacaatttcaaatgcaagctgggagttgtcatcaaataaagcctgcccatattccaactactataagtgacatacccagtattcttcctataaattttgactttcggtatccaaaaaaagcaatcgtatcgggagttgtaaacggtaataaaacaacaactatacccattagtataattcctgttcctattatgaagtcactgtttgataaaatgccataaagcataactaaaaatgcaacaataatttctaaaataaaatatttaattttgcggttatctttctcaactatccgtctataattgttttcacattcgttacaacaaaattcaatatgaatatttagctttttgccgcaatatctacatttattcattacaaatatacctctgcagtttcaaattgtcaaaatacacatttataaaatcttccagtagtaattatatctccaccactacattcatatggaacatccttcacatagccaaatccaaggtttttaataattcgtcccgaagcaagattttctgttgcatgaatagcaatacattctttcacttttaatacttctttcgcatatttcattactgtactcatagcttccgagatgtaccctttaccccagaactttttaccgagattgtaggaaatatcccaattattttcatcctcattaaaatatataagacaagtacctataatcttagatgtttcttttaatatgatgatccatcgattccatttatcatccgctattttgcctaattcaaattctacaaatttttttgtgtcatttatatcgttgcttgctttccaatacatatatctcgaaacatcttcatcctgcatccagcaattaaaaatttcatttatatcatcctgatgaatttttcttaaaattaatcgctccgtttccaagttaggtgtatccattttcccctccacaacttcaaattttctgttaacctgctgttatttatcatcttttcgtcttacaaactcaacaaaggcgaagatgatagatattacggttaaaacggaaactataagttctgacatgttatctgcatattctgcttgtgcaggaactatgatccctaaaagaagaaagtaagtacaccaaagtaatccaatcataagcagtgtaattgtactgtattttaatacaactgcaaacttattgagtaatcctcgcataaactctacttgcttttgtgaaggcgctttcttgcgaagtatagctttcaaaccaccaaatattataccaacgactatgcctattgatattgcaatgaaaatattacgtaaactgttcacatctactccccttcctcaaaaatcaggttttatcctcttttgctttcttaatatctctgctagttgtaaatctattggtttatctatgttaagcattaaaattttgcctccgtgtaaaattgctgctatacaaatggatattaattgttaaagccaattatatcactcttatttgatcaccgtcaaatatgacggtgtatagacccccatacccttctgttattgttgaaaggtatggggacgacacattttttgaatggttgatttgccagttcttacgacctatggtaaatggacggataccgttttctgcaagattgtttggaatggagcagttaccatcccaaagataattcatcagaccggagcttttcttcttccctcctcaaaaagcacctggacaggtgtttcatcaacatgaggggatttctgttccagcagtttttctttcagcagcccgactacagaggaaaacggttccctttccaatcaaatacttttaaacggttatatttacgtccgcagaaaagagacaggttatttgaaaaaaatccagtttgaagttgtactgaacgatagcagctaacccattgatcaccctgcccatatcagtttatccccaggtcagatagaatctttcggcccgtaaaatgccacatacaaaaatgggaagagacaatgggcaagcctcaactagctctagctagagcgattcaatccattctatccagatggatagagactatatcgcactagtttgataaacacaaaggtcatgcttcaatccactctacccaaatgggtagagacgaatttgctgatataggtgatacagttggcgaagtgcttcaatccactctacccaaatgggtagagaccatggagtcgaagtggcatccgtcagttatagtgcttcaatccactctacccaaatgggtagagacagcttgaaagtgcaaccgctgaattgtcggctgtgcttcaatccactctacccaaatgggtagagacgaggaagaggctatcagcttttgtaatgattatgcttcaatccactctacccaaatgggtagagacagcaattatgcacattattcctcaacatactatccgaatacttgtcacaattgcatactatttggtagtaaaataatattttctattacattttcatttttttaaacaaaatatctaatacatttcggtgcgaatctcccggcatttttatgttcacatatgtttcgcaccgtaattactctctcatcagattttacaccgccagccacacaacttatgcctatacgcggtcaaaaagttttactccctgataagttaaaaaatcaaagtatctgtcacatcgaagcttttctttgccccgatatgttcaaccttgtttttatatttatctcccagattataaaatcggaggctgtctttacttttatcgacaatatcctcaagaattgcctttacctgccgatattttgccgcatcaagattacactcgaatacggaattctgcacccgctgtccataatttacacattgctttgcaacttttcttaatcgccgctttccagcttctgtttccgtattcacgtcatatgtaattaaaacaagcatcttttcacctacttccaaagaaacggcggatactcatctaagtcccctcgtatataccttgccagtaacattgcctgtacataaggaactaatccccattccatcttttctgccaaaaacggatgtgtaattgtctctttctttttgtcctgccaatgggacagaaactgcctgcgggtatcatcatccataatcactgccccgctttcttttttggaaaagccggaggcacctatgattttcttgttaattaatgtgagaacaaatctgtcggccattacactcctaagttcttccataagatccagcgcaagcgacactctcccggggcggtccgtatggtaaaacccgacatagggatccagtcccaccgactctaatgccgatgcacacattcctgtcagtaatgtgtaagcaaatgagagcattgcattaacattatcaagcggcggcctcttatttctgcccccaaaggaaaactcatctttctgctgtaatatcagttcatcaaacacagagaaatatagagatgctgactcaccttcaatacctaacagtctctctgcgtcttcacactctctgattttgggaagatttccggacatgaaagcagatttttcttttattctgtccacatccagacgcagcggataatccctcgccgcacgttccagaacccattttgcattatagactttccctgttataaaattacgcgctatctttatgctttctttcttctgctcgcttatacggtactgctctttccgaagtgtaacatttcctctgacttctccggatacacgcgccaggaaacggccattaccgctcataaaagacagatcaatatttctttttgcacaggctcccataagcgcggggctggcgcctgtataaccaaatgtcacaataccttccagattatgcagaggcaccctcccgatctcttcctggtcctctaagatcactacattctctccatctaaagataggtagcggtttgttgacgtaacatataaggtgttcaataattttttcactttagtcctcctgagataacgctttatcaatatatgaagacgctgattttccaacaccaagcaccggaagacagatgtcttttaaagaacatgcattacagctttttgtcctttttaccctcggcgtataccgccgttcataatattgatgcatttctcgaaatgagtctctgaccttttggcggattgattcctcaaatacaaccttgctcctgtgccttgtctctccataataaagatatccatacggtatctcgcagcacaacatttcttccagacacatcgcctgtgcagtcaactgcaaaatatcaacatcattttgtttgggacttccccttttatattctataggtactacctcatatgtaccatctcttcccgacagggtaatccccgttccgctccggtggaattctacaatatcacattctccgctcactcccagctctctggaatgtatcggcatggcacggctgatgatcaaatcccctcgtttctcttcactcgtcacgtcatgtgccttttcatggagcagttttccttctaccgtcctgacattttccgaccattgcagttcaatatatgcaagcgcccactggcgcctgcaaaatgcaaagtgctggatccctgataattgaagatactcctcctcattatacaaaatgatactcctccgcttttacgcagccccctgccggttccaaagtgattttataatctgcatatgatttcggtctttcatttaatgcttctactatgacactacgatgtatcttcgcgctggatacagccggtgtcttagcctcatgctgccaccaatatagatcacatacctccatacttccttccggtctggccgacgacgcgtcattttcaaacaaagtttttaaagattccttcaggatatctgcatcttcctgagaaaaccctgttttttcagcaagctgtacattaacgctccctttgatcaaatacagcccgaatccgatccggtgcttcatccccattgtatctgacgcctttccgcctttccccggctcactattcacacttttagtgatctgtgtgctgatgatgtctactggagaacagctgactgcctgatgtatggaaacagggcccctgatgccgagagagacatcatttcccttaaatgcaaacacctgcccgaatgctcttacatccagccattctttacaggcgatctctgcacaggcttctctgtcagcgccttttccattttttatttccttcgctaactcttcacacccatctgcacgttctttcaggcttttaaaaccatcatcggagcgttcatcggactgaacaaatactttttgtcccagatcctgaaaacggttgcgtatttttctcttaatacaaacatccgatatttcgccaaagccatcataattttcccttggtctgttaccatttaacggatccccatttggattggcatctgttactgaaacgactgctacaaaatcaattttcccttttaaactactcatcttaatcctcctttgtctcttccgttttctgatatctcatttcattcaactggctgtgatagccgagcagataaataccttccagcctgctattgtccgcaaagctgtctatatcaaacatctcacagatttcatccagcatctttttgtaataatttctttctctgatatccagcttctttaaatatggatgtatcctctgttctatcgtctgccatgtccgatatggatgttgtgaaaaagcattcatcagcctgtccgcattggtttcccttcccgcatcctcatcccggtcaaaggttctccgctctatcctgtctgcaaccgccagcagcctgccataaagataatctctatttttgcactccttatccaaagccatattccaatcctcctttttctgctcccttcgttccttcttcaccatcgcacaagcaatccccaacacagcttcccagttgtaccttttctcataaacaaccggagaagacgccttttgaaccgcctgtcttaccatatccaccggtatctttctccgctctgagatacacggcaaaatctttttgcagacctgggcatacattcttttattatttaatgtaagtttcccattctgctccgttccataaaccgcttccgcaatttcattcactccggccatccccaggtagtcatacttatggccttctttatattttacctgctgccacctgcaagtctcataccaatatgtcagattctccaggaaatggctgctctcgaaggtcttatattctgtcattgccagtcttccggtcgtggccgcgtcaaacgccagaagcacgatccgggatgtatcaccaaacttcttcccgtatcccttcattgcactgcaaaaaccggacgcctggacttctcctgtctcactttccgtcagctcgtcttcatcccagtctttctggttaaaatattcatccgttattgtatctgtatctgcgctccatgtgggaagcggattcataccagactcccatatcacgacatagagaccgtcccaactgtacccttgctttctgatgatccactttagcgcattgtggattttctgcgaggtttcgtatccaatcgcaaacgcctgtgttttatcagaaaaacgtcccctgaacgtaaaatttgattcatcgtttgctgatatgagctttgccccgtcaccctcatttcgtattttcttaggctgcagataagaaatggattctcttttcccggtcaggtagcataagtctttttccggaagtatagacgtataatactgaatataggcttcctgcaaagtcttgtccagccagcactccgcacaatattgtccactggtatctgtcagaacatctgcgccggcatccaatatgctttctacacggaaacgcacaaaggcgtctgcctgggctacattctgaattttttcatcttccgtcatctttccttcatcatcaagcaccataactccctgctctgcaagatcttttatcatgcatcctttacgcacatatgcataaatagcatccacctttttatgagtaaaaggtgactcatgccatttctgaagcgcctccatatataaccgataattctccgaatagtctttttgctttttcccctgccggtaatataccatataatcccctgccaaatatttcaggttatcacaaagcgggtggggttctgtccccgctgtacggctcagcgatttttctgtgaccgggatcatcgtgagattctccgccttatcaactgcctttgcacttaaaaactcaccgttctcgtcgatcgtaacctcaatctgtgccgtaactgtcgtatgaaaaaccggcaaaaggatcagcggaatatgttcttctccttttttcccttttatcgtcttgtatgttacttctccggcaatatcctgatttttctcatacagatcaagcagctcatttgtccagttcacatgctccctcctctccttcaaattcttttagccctgtaaaattatgcatatcttcaccgaaagatttcatttccatttcttttaaatgacgtttctcggcacattcttccggccttacaaattcaatgacgccctgcttcattactggataccagaaccgcgccgtcatctttcctttatcttcttcacagactgcttcgtccgcgtaagtgatcccatgatacataaatccatatccgatttcccccggcacatcatcataatacccttttccttctccaaacacgcaagtggacacatacccctggcactccctgacgcccaggaaaacatctcttctccctcctctttctatcatccgctttgcaatgttatgatgcttgtgttcatttcggtcatttgtaagctccgggcggttctcattccactcaaagtgtgctcttacctggtatttcacctctttcagataagtgtaataagacaaatcatttccgccgttataattaattggctttctcccctttgtctcagtctgaatgggatttaatacgcgcaccgcatctatgacccagatcagcgtaggtttccagtatatactgtgcaatattcctttcagcgcttcatacgtgggaatgtgatacgaacatttctctcctcctactcttgttatcgggtctgcaaataatgcgtcagctccctccacttgaaactcaaccgtatttctgtacttcatccttctcaccacctttaataattgataaattccattaccggctctatagaaactcctgtttcatggctgtaatagttctcacttaaaaccaatatctttctcttatcatcacagacagttgtgactgcattacttaactgctgtctcatccgatccgaaatgcctacggtatacttctgtaactttctcaccgcctgctgctgttcatccagcggaacatattgaccgctgagtatcccgatctgctcttttgcggccgcatcatattctacgaccacatccaccttcccatcctcaggtatcacttcaaacaggtcgcccgctgttttaaacgcctgttttaaaaaagtatgtccgtctttataactcctttttacggcagaccataccttggaattagtggataacagattcaacagcgtatcactcctgccgtctgccgaaaccaaatagctcatttcttctttcctgctgctcatgtataaactataatagagcccgatcgcttttcctgagtccagacggtcatcaaaggatgacggccgcatttcaaattgatacagtacgcttagcatagcttcttgcgcctttacaatatccctcagccccgatacgttctctgcttcttttgacatcttaatgacgtatacatttccattttccacttccttgttgcggttacatctgcccgccgcctgtacaatactgtccaatccggcaagggaacggataacacaccgaaaagagatatccacccctgcctcgatcagctgagttgtgacgcagatgatcttcctgtctgcctcaaacagcttctcctttatctcgtttaatacatcctgcctgttttgcgggcacatatttgtactaagatggaataacaggtaatctgaatccttacattttttcttcaaatatttgtatgtcgcttcggcacatttcttcgtattcacaattgccaatacccgctcttcctcctgtgccctgtctaaaataaattcccccagttcttctgccgaaaggcccaaattcgtaagctttgttttatcatgtatcgtcgtcctttgaaaggcatcctcatacttcttatcagattctatcatgttctgcgggcgatttaagctgcactccatgatcctgtccagaagcggctgtgtcgctgagcagagcactaccgtagattctccaaagccggtgagaaagttaacagccagattaaacagttttatagttcttaccggcagcgcctgtatttcatcaaaaataatcacactgttacagatattattcatccggcgtatattttttgacgaggaagaaaaaagggtgttcagaaactggaccgccgttgtgacaatgatcggactgctccaattttccgccagcaattccttcctccgctgctcctcttccccctcgtagaaaatattactgtgatgctccagcacgatctccggatttcccgttgcttttcttatctcttctgcattctgctccaaaatactcgtatatggtgcaacgtagataatatgctttttatgatgtacccgtgcatgattcaaagcaaatccgagggaacttaacgtcttacccgaacctgtcggaaccgtcagccgatataacgtcccgtccgttttcccctgaagcagacactgtcttaaaatctctgttctcatcccactcagttttgaatcttttggaaaccggctcatataaacgtcaaaatatcttttgcactcatcccatatacggtttctgccatggatcttctgtatccgctcctcgatcttcttattctccataaagcaggcggtatctgaccaatccgagtctatcagtaaggacagcaatatccgttcatacatcccgacaaaaaaattcttctgcagactgcgctcaccttgcgtcaaagattgtgcatacttgtgtaaggcagttaatatctctccaatcctttttctgctttcataaaacttattttccaattcttgtttatcgtgaaattgataaaatctttccgaaacacactgaacattttctctttgtttcaatcgctcatctattaatatctttccgtttccagacaaggcatcggaaagaccatgatgacagtaaacagggaattccatcatctgtgtctccatggctccagccgcaaactgttccagcagacagccgcccgcggttgaatgattcacttcaccccggtgcgtctttttgccttcaatattcttttccatatattgttggaaagcatccagatatttgccggcgtcatggtacgttccaatcaacccggcaattggagataatatttctatagaactgttttgttctgccaagaaagcaacattagaattatgttctaaaacagactggactgtaatttgtccgttctcttcgcggaaatgtgcaatataaggatcttccatatgttcatcctcttaatcctagtgtgataaaatgcagatgaggtttccctcacctacatcttggcacttaatataattacctttttaaatccacaaattttcatttgacaatttgattttatcataagatcaaagatatatcaatatttattataaatttaggtatttataataataacatttgatttttcttagtgacaaattttaatatgcatgatatagttaggataattattcaaatatacctattaatgtaccgaatcaaaatcagaacagaagtaaagttcacctcttaaaaaggagaatagtcatgaataaacaacggacatcatatagtcaagcttataaacgccgtattatgaaattatatattatcggtttttccattgaacagcttcatactatatattcggtacataaaagcacgctaaatagttggctgaagttgatcccatacattgaaatttcagatgacgaaaagcaacttttacttgattataaagaattgtatgaaaaaacacactcttctttcaaaagatgacgactaattattctaatttcaggaatatgccaatttttaaagatatggttcaaatatcttcatgataagaaaacaattcacataagacaaaagcgctgcccctatcacactccaaatgcctatcccggctataattgtccgatgatctaaaaaagtaagaagcacacaagctcctgtcatcaccagaaccattaccgcatatggaagcctggaggcaggaatcagtatagcatttttgatcatactgcctgttgtattttcaaacttggcaattaacggaaatacaaatatgatctccatgaaataaaaaaacacaatgatataaaataccatcgttccgataaggcccgcgcctccctgcattctgtgcaatatcgcggtatctgccaggagcagcattcccaccgccagcagcaccatccatataactgtgctctgtctgaagttctcacggaatgccttaaagaaatcccggactatgtagccttcctcatttctgacgatcttcagcataaccgaatacaaggctgttgtagaagcacctatcgtgatgatcccaacagaacacacgatccataatatatttaatatcattaagtcaaatatacgtgtcagtatccttatgataatattatttcccaatataagcacctctgcctgcaggccggggaacgtacaatatgagtacgctcccgtcctggctttcattgcaatatttaatactgtactttccacatataccggcgtgtcaggtaatcgatcttagtggcggcggaaagtttcttcatatatgtattatttaatataggagagaataacatatggttgaaatactctgcaacagaatctttgaatctgttgatccctaattcttttgcgtccagaatatatatcttgtccccgccatattctcttaaaaacttaaccgccctttcgtctgcctttctcgtcctgccctccgatacaagcagaaagaatgactcattcttgtcaagtacctcaaaaggcccgtggaagaattcacagcagtttatcgttggcgactggatctgcaacatctccatgatattacagatggaaaagatatatcccgccgcatacgccggcccgctggccattacactgatcgtatgctcctctttattttgctccgcccacttttccgccagcggcatacagtatgcttttgcgtcattatacaccttatcaaggatatcatatgccgccatggcatcttcataatgttcatatccttctgttacatccacgatatccattgcaatgcgcatccccagcgcggcattcgtcttactctggtccgattcgtcgaacatgatgctgtcatattttacattataatcacaagtctccgtcagcagtgactcctgcacatacagaccaatggtcgcggcaccaagttcctttgccactttggctgctacacatgtctccggcgtccctctcatcgatgttacaactgctatcgtattttctccgacgaacttcggcggagcatatacgaactcgttgctcgtaaacatctgggaacggatgccttttgcttcccggtccataaagtactgcgccggataatttcctccgtttgaaccgcctgctgccagccagactacatttttgatccctccgcatgcttctctgtcttttacaattgtttcaataatctttctgatctccataacttatctcctcaacagttatttatatattcttttagtcttttaaaggatgtctccatagcctcgtgaggcgtgcgtatatatttatcattcagtatctccaggctcagcgggcccttgtacgcggcatcgtccagcttcttgagcatatgctgtatatcaagccgtccttctcctaagacaagatgaccgttcggaattccatctgccacatggacatgggctaattgtccctccaggtcttctaccgcctgttccattgtctcccctgaaaagcccagtgttgccgtatctatcatacctttgacagcaggggagccagtttcatgaatcatccggacaacatccttagaattatgtgtcgtcgtgtattctcttggcgaggtttccagcacgagcttcacgccacagctttctgccaggtctcccagtataccaagcgattctgcggatcttctccatgcacaggactcctcctcgtcaagcgtcccgtaacctgccagagtaactacaaactccgcccccatctcagccccgtaccggatcgattttttaaatatatccagacttctcttccttgcgttcacatccagagctgcaatattgacaggatacatgcattgttccggagtaaagcagacgacattcagtccggcggccgtcagcttctttgtgatccgctttacatcccaatagctcacatcatccagatgaaaatgaggaaagcacgcatagaactcgatcggtccggcccccatcctctgcagagacttcaacatataatccaatgaatatttataataaggataattagatgtcagtatctgtgactctttcaaattcttcacttctgtcacctatcctttcacacttcccgccgttaacccccgcacaaactgcttctggagcagtaaaaaggctatcactaacggcagcgaagctattaccatacttgcgaccaccagagtccagttcgtcgtcgtcataccctgaaagttcataagtcccactggaactgtctttttcgccgtgctctgcagcattatattcgcgaacatcagctcgttccacacggcccggaagcttacgatagcgcaggacgcaatgatcggcttactgagcggcgcaatgatcttgcagaaaatctgccatgtggtggccccatccatgtatgcagactcatccagactgtagctgatacttttataaaatgtcatgatcagaaatgttgcaaatgggatcctaaacgctgcgtcgatcagtatcagacttgttctcgtgtcataaagccccgcgatcttgaccatcttaaacagcgagataactgaagactggggcgccagcatcaatcctcccagaataatatatatccacagcttctttgccttaaagttgaggcgtgccagcggatatgccgccagacagctgacgaacgtagacaataccgtggctgccaccgtaatgatcacgctgtttgacaggtaaatgccgatcccctgtttccacgcatccacgtagttctcccacatccactgcccgggcagagaaaatggggacaggaacaactcctggttcgttttaaagcctgtgacgatcatccagacgagagggagtatgataatgatcgcaaataggacgaaaaatatatatgccgccgcatgtgtaactgtttttttcatgattcttcctcctactgctggtcgtccagacgatatcctctcatctgagccaatcctatgataaatgttacaataaagataaaaaacgcgagcgccgatgcataccccatctggtcatttctaaatcctgccttatataaatatgtcgccaaggtttctgacgcatatcccggaccgccgttggtcgtaacgaacacctcgtcatattccctgatagatcctgtcactgtaatgatcgtgttgatcagtatcgtatcctttatctccggaacggtaatatagaagaacttctttaccgcgttcgctccgtcaatatctgccgcttcatacaactctgccggtatattctgtatcgccacgataaacaggatcaccgtgtaacccacatactgccactgggacattgccgcaatggcaaaggtggcgctccccgcatttcccagcaggtcgatcttggacgcatcgatgccgatccattcaagcagcggatttataaccccgatggaggggcttgcgatcatcttaaacgcgatccccacaaccgtcaccatcaaaagggatgggacaaaatatatggaccggaagaaattctgcgtctttctcatgaatttacactccagcacattggcaataatgagcgctataccgatctggaatatgaccgacatcaccgtaaagatcaaattgttcttaagagccacataaaatacttcatctttaaacatcttgatgtaattcgcaagcccgacaaaatcatgcctcgtactcatagcgccccagctgaaaaagctctcatacaggttaatgaatatcgggagatacaggatcacgatcaccatgagaagcgccggaaaaagatatagacctatagtcttctggttcttttttctcacgacattatcctcctcttctgataagaggcggggtgaaaagcaccccatcctccttgctatttactggaatctgcagcatcctttgccgccttttgcacgtcctttacaatgtcctgtgcagacttgccgtccaggccctcctgcagacttgccatatatgtatttgccacatttccgtccacacattgatccagccactcggcgatcgcggtataatcttctgccgtctcatatgctgccgcgatcacaggatctgaattttctgctgtgatacctccgatcagcgcattcggaagtccggtttctttcgtctgcttcagcgcctgttccttggatgtcataaacttcagaaactcaacagcctcatcgggatgcttgcagtctgccgagaccgcgtagttctcagatccgcccgtcacgatcgtagatgcttcatcacctgccgcgtcagtcggaattggaatcttaaaatatccatagccgtcatcgcccatagcgtccgtatagaaagaaaactggcttgtcgcgtcaaggatcatcccatacattcctgccgcaaattcttcacgcacctgataataatctttggagttgacattcgttccaagatacccattatcattcagatcgagaaaagtctgtacggatttgacatagccaggatctgtaaattctccggatgaaggattgtagtcgtctgtcctcgtcccggcatctacgtagctggcattaaactggcccacataccacatggtataccatttgtcagagttgccaaatgcgatcggagtgatatcttttccctttaatgtgtcgcatacattaataaattcatcccatgtttccggtacttccagattattatccgcaaacactttcttattataaagcatgtacagcacagagcttctatatggtaccgcatagtttttatcttcgtatacactgctgcttaaaaatgacggaagaaaactgtctctccacttgggatcttcctccatatacggtgtcaggtctaaagtccttcccgcgcgtgaaaaacggttcagacattctccgccccaggcaaagaagatatccggcagatctcctcctgccgccagcacgcttaacttctctttaattgcctgatcgctgatattctcatattcaatatcaacatccgggtgggcctcttcaaaatcagcgactgcctgttcaaaatatcccttatattcatcttccggatgcttgtccaggaacgtcagcttgatcttgccgtcccctgcatctttgtctttaccgccgcacccggcgatcagggaaactgtcacagccatcatcataactactgctaaaatccttctcttcatcttctttttcttcctttccttttaacctgttaaagattaatgattttcgacagatcattcgggtcgacgtcataacccacacctaatgaaccgtcttttactactactgcagcggcaaattccgccgctttttttaatgaagtagttatcttatcctcagcagttaaagactcgtcagcctctgccgataaataattcatcaaaaacgcactaatataagaatctcccgcgcccatagtatccttaaccttgaccctaaacacctcctgcgtatagaatctggagccgtcacaggcaatggcaggctcccctcctcttgtccctaccgcgatgcggacgccaagccggacgcatgctgctaatatattttttgtttcttcttcactcatatgactgcatgagaaaaacgcgaattttatatatggtgaaatactgtctatatcttccgctgtaaaattatcataaaagtcataacagatcggtacgcctgctcctgccagctttttcattctggacttatctaccctggctccccagctgatgcaggcaatatcgtaagtcttgatatatgtgatctcttcctccgtaaaggtaaagggatacaggtctgtcacccctttcttattccagtcgagaaatacgcggtcaccggccttcagatctacgagcgcatatccgctggatcctttttcatgatgggaatgactcgtatcgataccggcatccagcaaggtctgctccagtatactcccggccatatcatctgcaaatacacccatgaaaccggcgtctgctcccagaagaccagcattataggcaatattgtattcatttccgcccggatacatcctcctctgatggcagtagatatccatcgtcgcgattccgatccccaatattcttggtttatctcccatatcgtctcctcacatttaacatgtattaagtcgtcttattaatactataattataacatagcgttttgtcaatataattattgcatcaaaatctttttttgtgcaataattatattttcacccttcttttttagaaaaaaaataggccttccttatggaaaacctataaaatcatttttgcttgtatcaacttatattacacataccatgtcagaaaccggtcattgtctcctctgactatatctttcacagtatggatcgcatcaccattcatatcaaacacacacatctcagattcgatcacaggcgtcccgagagacagatccagatactctgccgcctctttgtcggcaaatgtgatccttacacttctgcgtcctttattggaaggtatcatgtgatacttatttatcaaaatatcgtaatacgacccggtcagatcttcctctttcatatctatcagatccggagacatatgattctcctcaattgtgacaggcacaccgtccgcacttctcacccgcttaagcacaagtatcctgccatctgttttatcgccgaaaaacctgcggtccagctccgtctgaatgtcttcgatcccgaacttgatcaccttggatgtcagggttatgccctgcatcttggcgtcttctgtaaagctcgtcaccccgatcggaagccggagcatatcggtatgcgcgacaaagctgccctttccctgtacctttatgatatacccctctccggtcagttcctccatcgcattgcggacggtgacacggctcatattgtactcctgctgcatctgtgattcagacggaagcttatccccgggctttagtattcctgtccttatttctttttttatcttatttttcaactgaagatatagcggcgttgcatttgttttttcaattgcactcattaatcacttctcccaataactcgtattataacttgtattataatcccatcatataccaacattaatgtaattgcaaccttatttttattaccgcattttggaatacgtaaatgtattgaaaatctctccccaatggaattgtccctgatattctggtgtaatactagatgaaagccctttctgttcttaagcgtttttatttaagtcttatgttaaaatacccttatccttttaaccacttttcaatatctgatgcactatataacatgtctgtcacaataaccttttcgccgcgcatcacataaaaaatcgaataattatctactatcattcattaaatcagcattgatttcatctggtgctttcggtaaagtcactgaaaatggtatgcctccagttagtgaaagctgattcaaatacatatcgatcgttattcctccattgctgattttagttcgtcaaagctcatccagccgtttccatctgcaacagcctcttctgcctccagcaatttagccaacagctttttctctgctctgtctttttcataatcctcaatatcaaggattacaaatcttcctctgccattttttgttaagaaaaccggttctcctacctgacaatttttaaacacttcattatagtttcttaaatcagacactggtaaaatactggacatattatcaactccttctttgatattattattcttgttcgtagtcttattatgcaaaaagctgctgtaaagttcaacttaaaattttacagcagcttcattgtactattttttattatctaaaaataacctgcaccaaatacgtatcgagtacagctaattatcgatcaagcaaactgaaatttctaaaatatgccatgattatatttatattgtgcagacaccattataataaggccaccaacaaaacaaatcccaaacgctatccagctatatgtatccttaaatattggtaaaatccttacggcagcaaaataaacaatacaaaaacaaatgacaggcgctctcaaggaccacctgtcacatctaataactcatatcaatttaatatcactcaaactccctatgcagttaacattaatgttaaatatttagtcatttttcattagttttggtgcttatattattcaaattatctggcttatttttcgtttttaacagaaaaggtatcacatagtttatcacttacatgccttgttttatatctatatccgacacttctccataaaagttattagtataattatttattatcggcgtttcagttgctttccttttctctgcatcactaaacgtcaactcgtatcctactattccatattcttcaagaagtaatgcccaatctaatattttatttcttactatactcatgattctatataattcacttttggatgaataaaaaacgtactttgttggaataaaatcgatatgttgattaagccactctgccactttcccatttacattcaaacatatactgtcctcacttgaattatacacatcccaaagtgatgataatgaattaggtattggcatttttgagattgtgtttgcaagttcccccggcattaccacaggaacccaaccatgataaggatttaatccctttatctctcctgaaatagttcgataatccggtatctcctttttataaccattttgctcttgaacaagccattcttcaaattcttttaatcttaattttttagcaactaaatacgcttttctcaccaaggactcaatcgtaacattttcatctaatgcttctctttcgagctctattactatgccactcacatttaccaccctacaccatttatattaatgatacaataccagaggcaacgatactacccgctacaccgatagataaattttttatatcatttagaagcatcttaattttattaggcttgtctttcttttggagtagtaattctatttcattgattttatctcgcacatcagccgctttctcgccatattcatcatctaaaaaatcatcatatttttttatcttttggataatcttgtccacatcattgtagttaaatttctgatcaactgattgtgactgcgttgaactaaccgttccttgttgaatttgcacaccggtagcttctgcataaaagttatttgtgttattagtaatcctctgttctttccccattcgctcctccttatctctaaaatactcgattccttccatagttaacatgattttaatatcacctgaaataaaaacactactattatcactgatgcagccgtgtattttcaaatcatccattatactttcaatattaaatctaatattcggaatctcattaaatatatttattgggcagataatactatcctctccactttcctctctttttctaataagaacttctaagaatttctcactatccttccgcaatctaacatcctctttcataactgtttgtttttttcagttcgtattctaattgtttctttagattcttaattccgtttttattcatttttaccgaaattggcatataaaaaaacacctactttcatctttattatactacttacacacggtgctagcaccatgtaattttcatacgtcaagatcatatttgattcaattatattcaccttaatggtaaacaaatattttctatgaataatttaatttttgtaagaacaatagctctattattattcacgtcttattaattatgtctcgttcttattttgttcttcaagatctgctaattctttatatttatcaaaaagatcaatagctatattgtcaaaatcaggatatattacttttctagttattttcaaatccttcaattgactccgtaccatgtcttgatcctttatttcaattatatattcaggaagatagctttggtgttcaacattccccaatagataagtattttcagttttatgcaatcctaactgataaaagaatgagccactctgagcacgcattcgatcaaatagaaatgttggttcataaatcataataggcatatatggcaaattatgaaaatcataggcagatacatcatattttaaatatcgtaagtgattcacaaatataaatagatatatagaaacctctacactaagtgctctatccaatatattattttgaataggtaaataatcacctcctgaattccccataagatgctctaattttttatgaaattctatgtattgagaagatatataactattactgtgcgtaatctcacaagcttttaaaaatattttatcattatcttcaataaatttagtaaatagctttgaagatgctttgaaaggcagaagcttaattttatttacactggtataaaattgattataaaaggatggattttcatcgtcaactttaaaaatcgaatcatataaatgtttatctagttgctggcagtgttgtatcaatgaatataaaagcaaattaaactctcttttatttttacttactattctgttaagcccataagccaaggtttttattaattcttcatctgagaattcgattatttggtctagtaaatcttttggtctaggtcctctaacaaactttgaaatatctatttggctaattttattatataaatagatgtaccccccgtttttgctcgtcctttctgtagcaaaatataacgcggtcaatggattagtggtaacatccaataatggtgtcttcaaaaaatgatgttgtgcaaatgcaacaaaattatctctcgatgcgttattcaacatattgcccacttctttataatactctgctaataaagcatcaaagttaatatagttgtttgaaaaaccattgtcatctaaacgcctataaatagatgctaccctgctacaaaactcatcattttctccacgaaaataataggactctgaactaatgctgtcaataactttcatatattgctctactgaatgtattttcaatattttaggcttataaggtagcatatagaattctttcatagaagggttcctccttaaattattctgtaatctttattctttgaaaaactcgtcaaaatccacgtcaaaaaacaccttcaacaatttcaaatcactggctttaatattcctccgccctgcttcaatattagccaacgtacttctggacatcttgctaccttttaattgtaactcggcaactactttgtcctgtgtatatccctttgccatcctaacggcctgaatgttcctaccaatcggtatatcatgtaatatatactgcatgtccatccctccaacacgattgttactaatcagtaacttttgtattgattatagtttaattacatggtatagttgtcaccatccagaaacattcgtatttcaagggggacaatatggaaaagattttggaacagctttacaaaggggaactctacccctattcaacctttcaaacaaccattgaagatttcaaagtcaaccgtggtaaggcttttgcttcttactcatcttttctggaaaaactgccagataactttaaagaagagtttgtacagataattgatactcatctcgatctgcttccttatgagttggagcagaactttattgagggctttcgtattggcgctcgcatgatgaccgaagtattccaatctccgatttccgaagaaccggcataacaaaaaaaggcaaccacaagttacatacctgtgattgtctttttggttactacctttcaaataattcccgctctgtcttccaaatcttatgctttagcttttgctgctcttcatattttacaaaatatttgttagtcagattaaatacagaacattctatttttatcattgtaagtttatcggagacttgacatacaagcatcacattatggtataatttatatgcaaaattaaatttattgcaaattataaataaccatgtaattaaaagacatatgaattgcgtagaaaatatacagttaattttgtataaatacttatcataaaactgatggtagcattcaagttgagggaaaggatggaaatatgggtaaacgagtttatataagcgcagactattctgaagtagacggtgatcgcaacgttgtagaagaattacataaatggggaaatgataatttacataaggtggattatgttgataccgctgaagttgtttcaggcagcatctcaaaagatcccgattgtcgaccttgtgatctaaaaaaagaatttaatcaacaaattaatgtatcttcggctgcaattttcatcattggtgataagacagcttctaggattgcaggaagtatctgtaaacgcaaaaatgatggagcgtggtgtgattgcacaccttataagaaaaattcaaaaggaacaagcacttgtaaatgggatacagtctcaactcctgggcccaacgatgacttgggtaatattaatacatattcctatattaagcatgagtttcttcaagctaagagaaaggggaaacctattgtaatactatataattctctatataagcaaccagcttggcttccatcttatatgaaagattatgaatcagatgcacaggcattttggacaaagaatgactctggaaataaagttggaaattatttctatattaaaaaggcattaggatatgtttgatcaagtaaaattattatggaaatcacttacaggagaaatgaacacaccaaaagccataagaaaattaatctacattacaattggttatgtatcatcatttttttcatttgcaattttacttaaagatttagcaggatggaacaaattggagatgttgacaaagaatcattggcagatgattatagtcgttggttttatcacctcatgtatacataatcgtacgaagataaattcttgcaaaaaggtatccaatcgtgatatgcaaattgcaattagcattaaagatattttttgtaataaatctgcaaatagtttcgtaatcccaactaatactttttttcgcactgaaatggataaagaatatattagtcctcgaagtgtacaaggaagatttcagttaaaatatttcaaaaaaaatattgataatttggatactatgattagtgcaagtttaagaacacaaggaatcataggagaagatgctattgattgctttggttctacaaaaaaatatccaatcggtacagtagcgaaagtcgattataaaggtaagcacttttactttgttgccataaatgatgtaaaccaatacggaaaacctataggacaaacaattcaaaatgttactactgctttacttggcgtaatcactgcaattcaaaggatgggacattgtgatacactttgtattccactcataggttctggaaaagcggcaatccaagaagcaacaaaagaaattgtatttcaaaaaacagttgattgtttcattaaatcaaaagataaaattatcagtaaattaattatttctatcaatccaaaagatttttttaatggagaagtcgatttgaatagaatggaaaagtatattgactatagctgtgaatttagataaaaatatattattttactatccacatacataaatcgtattgtcttttctatcgatttaaaatattaggaggcattagcatcctcatatttttttgtcgtggacttgacaaaagggtgtcttagatcatgaacccttattcgctgtacaccagctacctgcgccccactggtcatctcatgatgcatataactcttcgtcatatggaatatccgatctgttggcataatgccatataatctacctatataatcctgtaattgctcacataaaaattctggcatactaacatttcttttgctctttagtgtctttggatcggtattgacgcctttcccctcaattttctgataggatttgtttatcttgattaccttgttcttaaaatcaatatcctgcggtgtcagtgctaacagttcacctattcgcaatcctcactagtatagtatctggaaagcatgataagagtatggtttatcactaatgacctcggcaaacattaaatactcttctttcatccaaaatgacatttcctccgcttttcccaatggtccggcttttactactggattactctttagttcgtaaaatcttaccgcatgattaacaatgcacttaattctgactgtaatgtctttaaatacgttggagcatacttctctccccgcttattcttgccttcaaacattttattttgccaacggataatatctcttagacgaatatcacacattttctgatctttaaagtatgatagtaacttatttcttactatatgcgctttcgtcagccaggtatttcgttttagctttggttgcatatcctccgtacagacttcaaaaaattcccccaaagtcatatccagattagaactgtctttcatgttaaaatggttttcccattctactgcttctcgcttggttttaaacccacgttttacttttctgcaatcctttcctgtccaattggtatagtggaaagatacataccatgttccacgtacttcatctttataagctgccataaattcacccctttctaatttgcttttttcatgccatatattttctcttgaaaatactttctgctaactctgccggcaatcgtgataaatccctgttgatccagttcttcattcatctgcttcacccgcttatatacaaaaggcttcgatacacctaattcttccgccacttcactcgctgttacaaataaacctttccccatctacctacccccctttcgtctttactaatatcggcctccattcatattacacactgtcagtatttcaactgacctcaattactttaatgatttgggattgctccttttcgagattcccaccatttacgggagtgtctatcttcgctcgtcctattggagttatggcaaagtctgttgatgtgtaatacagctcattcttctttaacatttttattaatgttgtatttagattatacattaactaatttgttaatgctaagcgttttgttcgcaaatttgttaaagttttttatttactatatttaaaccatggtatataatgggtgaaaaggcggtgataataaatgactatcggtgataagatcagatatattcgtaactttcggggacttacccaaaaggagttaggcttaaagattggattagatgcgaaaagtgctgataatagaattgcgcaatatgaaacgaattatagagttcctaaaaaggacatgctggtacagattgcagaagcattggatgtgaatgtaatgaactttactggttctattcctggttgtgcagaggatattatgtttacgttcttctggatggatgaagaaaaccggggaatgattaatctttttcagttggtgaaaaatcaaggcaagactaatgcatcagatgatactgctgttcgttattatgataatgatgattggcctgctcatgctcctatggggatgtattttgactatcctgctctgaatagatttattaaagaatgggctataagaaaagatgaatttaaaactaaggaaattacaaatgatgaatatatagaatggaaactgaactggcctaacacatgtgatgattgtggaaagcatatcccaaagataaattggagaaatcaatgaacctatttttattttatggagctttatttttactattaattatactaggctttgtcgatgcaaaaactaattatctaaataaagaaattaaatattatgtttataacgaaaatggttctacctatgttcgtgtaccatactttttttggcaacaaaacaaaagaaaattagttgaagaagctttctcagaatatgttgaatatgaaggccgagtgtacaatgtaattgtcccatataaagatcaaaaacatatgccgacagatactagcggtgccataaatttattctacagagattattgtgcaaagattgatttgcttacagaatctgaaccgacagttgtaataaacacacaaattcagggagacaacaataatgttaatgtgattcaaaatctaacctatagtatctgtggtggtattgattccttacttaatgaagagcagatttcatctatcgacaaacaggttttagaattgtttaaatacaaacttaaatctgaagatgcatcaaatgaggatgccaaaaacataatacagacattaacaaaatatgcaccatatatttcacttgctaacacactaatcggattagtaaaaacagtcttctctctgttttagtttctttaggtatcacgtccaaaacaaaagccctagaaacggcgtaaatacgccatttctagggcttactttactattcaaattctatcgttgccggtggcttcggtgacatgtcataacataccctgttcacatttcccacttccgccagtatcctgttcgttatcttttccagcacttcccagtccaccttctccacagtagctgtcatggcatccactgtattgatggcgcggataatcaccatataatcgaagcttctttcatggttcttcataccgacggacttaaagtccggcactactgtaaaatactgccatactttcccgtccagccctgcagcagcaaattcctcacgcaaaatggcgtctgactctctcactgcttccagccggtctcttgttatcgcgccgaggcagcgcacaccaaggcccgggccggggaacggctgacggtataccatatgttcgggcagtccaagttcgatgccgcaggcgcgtacttcgtctttaaaaagctgcttcagtggttccacaagttcaaactgcagatcctcaggcagtccgcctacattgtgatgtgatttgaccattttggctgtctttgtcccactctcaatgatatccggataaatcgttccctgcccgaggaattcgatgccgtccagctttctcgcctcttcttcaaacacacggatgaattcaccgcctatgatttttctcttctgctcagggtcggaaacgccgtcaagcttaccgaggaatctttctgtggcgtctacgtagataagattggcgtgaagctggtttttaaacacctcaaccacgctctctgattcgttcttcctcatgagcccgtgatttacatggacacaggtgagctgctgcccgatcgccttcagaagcatagccgccacaacggaagagtcaacccctcctgacagcgccagcagaacttttctgtctccgacctgacgccggatcagctctacctggtcttctataaagttcttcatattccagttcgcctctgccttacattcgtcaaaaacaaatgccttcagcgtctccttatccgggagaccggcaagcttctgttcacagcgggctgtcggatggtctgcggccatcaccgggatcttgcagtcatatatttccggccttacttcaacggcctggccgtccacaacacggttctctccgccgtttaatataattccttttacgttgtcaagccgtctaagttcctccgccgtgatatcatgcgggtgtatctcgctgtacacgccgagctcgcggatcgcccttgcaagtacggtgttttcggtgcttcccatatccagaatcactatcatgtcctgtttcatcttttgtctccttctctcacattcatagttgcttttaaatgttacctgcagaaaatacgtgcgcttatgatgtatagttatcaaaatatccctgtacaagaattaccggtgtccctttatcgccggagccgcttgtaaggtcacagagcgaaccgatcaggtccgtcagccttctgggcgtcgtcccctgggcggccatatcgccgaccagatcttccttcttttctttgatacgcgctgagactgcgtcttttaaagcctgcccggacagttccttaaaatcattgtccgccagatatttgagtttcacctcattcggagtcccaataagcccttctgtgttggcaacggacacacacgggtccgccagctcccatatctttcctaccggatccttgaacgctccgtctccgtataccatgacttctacatgcttccctgtcttatcgagaaactgcttctgaatatttaaaacaagttccatacactttccggtccttgggaaaagcttgactgcttcttccgtagacttgttggatccgagaagaccataatcttcgttgcatccgcttccgtccaccggagctgtcaggatatcgtccatgccgcagacgacctccgctccgtttttcttcaacaatcgtttcgtcctttcacggctgtgaatatcacagtttaatacttttttcgtataattaaggatttccttcggatggtttgcgaagataacctcggcccccgccccctcgctctcgatcagatcactgtaatactgcacataatccacgccggtgaagggatgcctgttctcaccaaacagctctctgtagcgttttacatccagcacatcgctgtatgggttgacacctgcctcatcgagctgatccagagatacaagttcatttcccacttcgtcgctcggataactcagcataagcacaaccttctccgctcccctggcaatacccttcagacagatggaaaaccggttccttgacaggatcggaaagataacccctatcgtctcccctcccagcttatttttcacgtcctgtgcaatggcatctacagaagcataatttccctgtgcccgtgccacgattgattctgtgaccgctactacgtctctgtcacgtatgtcaaagccctcgcttttagctgcctccagaacattttctacaataatatccgcaaggtcgtccccctcccgtatgatagggcatcggattccccttgatacagtacccactcttctttccataccagtattctccttaatatattttcattcgtctttgtttattgtaccttattttccccttccgctcaatactgctttttcataaatatacaacaaaaggccgggccttttctgccctgcagagcataaagacccggtcctttagatatgtccttcctaactttcttttgtcagcagaatactgacaataccgcagagaattccacctgccggaaatacgacccacagcgtgccccagccgtccgcccaaaaacctccgagcatatagataagtacagcagccatcatgatagtgccgcagaactttccgatctttttcttctcggggcttgaggcattttcactgttatattcgtatatgctgtatttctttttctgcagtcccgcatagaccagaattgatatggaagctgcaatgaatatcatgaacaccccatgcacggcatcttcattgagctgcggcggcaacgcgacgccatccatcccaagctcaaaaatgaacccgcagaatataagtccgattccgacagcacacatggtaatataccttttatgaaacgattctatttctttttccgtatatacgtttccaaccattggatatcttctcgcaaactcactgtgctttaatccctgaacgacaaatatgagcactgcgccgaccacaaaaaacataaagagcatatcgcagatcttctcagctgtatacacccccgccagcagttcatacaccgcaaccccgagcagcaaaagcccgactccaaagcttatggccctgctgtattcattcatatgtttctcatattcatcatgttcctccacatatgaattccttgcgtctccctgcacgagcacatccatgccacactggaacatctcacttaactggagcagcttatccatctcaggaaagctgcctcctgactcccattttgaaacagactgtctggacacctgaagctgttcggctatctgttcctgtgtatatccttttttctgtctgagaaactgtaaattttctgcaaagcccattttggtctcctccttcaacttttatggccttatcatacgattgcacagtgtaaacctccaccaattctctgttgcgtttggctaatttaagcgcaaccggtatttgcgcgcctcatttttcagtatatttacactgtttttctattctcaggacagaaacttttttatttcttctacattctccgcaatataatctgcaccggccttttcaagctcttcacggcttccatatccgtgcaggacacccatgacgtcgacccctgcctcgtgtgccccgataacatcgtgtttcctgtcccctatcatgagcactccggacagatcactgatgccgcagctctccagcgcgtatgcgatcacttccgcctttttcaccctcttttcatccatggtggcgcctgccacaaaggaaaaatagctgtccagatgaaaatgctccaatatccgctctgcgaacacttccggtttcgaggtggctattatgagctttctcccttgtctgttcagcgctgccagcagttcctccataccttcgtatacctcattttcaaagatacccttatccgtaaagtattctcggtaatactcaattccgcgggcagtctcttcctcagaaaactcatagaactgccggaacgaatctgccagcggcggtccgataaatttgtacagcctgctcctgtcttcttctattatgccaaatttcctcagtgcatgcatgactgaattagtaatgccgatgcccgggtcggtgaccgtgccgtccaggtcaaacaaaatgtatttataatccatgaaactctctccttaaccgtatttatcccgttgtgctatattgtaccataaatcattaaaatgagttattttaatttataaaccatcgacaagaaagcatacggctgtataatagtatatatagccaattttattatatgagctgcggcagcgaatacaaaagttacagaagcgccgggattggaggaggtaaacttgtatacatatgaagtgaagaaagttccgtccaaagactgcaaatcacaaaacagattaatgtatgcacaaaagacggcggcattttcagataaaccgcccattcagagggcgccgattccccggcatctgatccaggcgatcttaagttacgaccatggcggagctgtcacggatgaactccggcaggcagtagttgcgatggatcacacggttctgtcacatatctcggatgatgtgatcagcaaacacgccctggacataaaaagatttatgaccggaaaaccagtgaggaccgataaagtactgccggaccagtctcatgcttatgacatgcccccttctgagtcgggaggtgagccccgctcatcatccctcggacaggttcatggcttcagcaatgttcaggttggtctcacccagtttaatcatatgcaggtgatccgcgaaaacagcgcacacctcacgcccatgggcgaatataaaacagataccgcaaggctggacaggagaatggcccgcattgctgaattgacgatcatagatactttaacatggttatttgcttcattgtcagaacaggagaagggaatattaaaggaacagaccatccggcttgagttcgtcgtaggcagcatgctcaacaagcagcaacagtctgcatggacatttaacggcggggtacattatgtaaggatctttttaaaatcaaaacagtctgtcgatccgtcaagtgtgccaacactcctctcaggcaaaacaccggggcttgagctaaaggatttcagtgatgatgaggcggaaaagtatttcagctatatcatatcccatgaaatgggacatgttctacatgcattactgcatccagctaaatttaaagtattgtcaaccatccttaatactccttcccttgaaacaatgaaggtaccgccagtgatctgcggattacttgactcagctcttcccggaaattctaattatgccatgaaaaatatgctggaggccattgcagaaatatataccgcgttggtaaatggtatccaaatcccctccatattatatgaatggtatttaggaaatggaggcatctccgtaaatcaaaatacgatcaataaggcaggcactccggttccagcatttattgcccggttcatgaacacttccctgcccggaaaaaatcacgtaggacagccggtaaaagaagctgtcctggaaatatccaaagcgctggaagccggagaagatattttacctgttctgcgtacctggtatatttcaaacggagggcatgcttaaccgccaacgaccaaagggactggattatactccttcctctgcataatgccttccgatggcatccgccgccatgatcgccgcatatacgtcttccggtgtaacctcaaacggcatattgccaagcgtatctccttctgcagcggcaagctttgccacttccatgatctgatccggcttcacttcttttatcccgagctgagcaagtgtggtcggaagccctacggcgctgcagaaatccaccaccgtctcaatctcctcggaatccgcgttttcaagcacaagctgtacgagtgtgccgaaggctactttctccccgtggtacagggcatgtgtctcttcgatcaccgtcagcccgttatggaccgcatgggcgccggccaggccgccgctctcaaatccgatcccggacaggtatgtattcgcctcgatcacatgctccactgcttttgtacacacattttccgtcactgccagcgccgcgctgacgccgttctccagaagcgtctcatagcagagcctggcgagcgccatggctgccagcgtgctctttccgcccacacagttcgctgcggaagactgcatgcacgctctcgcctcaaaatatgttgccagcgcgtcccccatgccggccacgagaagtctcgcaggcgccttgctcaccactcctgtatccacaaggactacattcgggctcgcaggaaggaagagatatttctcaaatacaccttcgtccgtatatatgacagagagcgcgctgcacggcgcatcagtagatgcgatcgtcggcacgatgatgacaggcttccccatgtaatgtgcaactgcctttgcggtgtcgtggatctttccgccgccgacaccggctatcatatcgcagcctgctccttctgcagccttcatcacgcggttgatctcattcatactgcactcgccgttaaatacttcgtagaccgtttctacccctgttccttcctttcccgcctgtatggacggctccacccgcttctttccggacggactcgtaaggataaacaggcggctgccgtagctggccgcatatttgcaaaggttgttaagttctccttttccctgaatatatctgcctggactgcctatgatctgtgccatggtatgtacctccttttaatgcttcgttatttttttaacatatagtaattatactgcttctcacagatttgtcaatatgatacatcctgtcctctaaaaaagaacagtgctgaatgtgtctccacatcagcactgtcttgttaacgttatattctttaatttactgtacgtttcacatagctcgtatgtaatgtctcatgagccttatggctgccaggctcgccgaggtattcgtcatacagcttcttgatggccggattttcatgtgacttacggatcggttttgccgcatcattgttgtacagcacacttgcgcggatcccgcgcaaatctgtgaaattgcgcacatcgccggatacctggggctgtccgcctccgtttacacatccgcccggacatcccattatctctataaagtggtagtccgcttcccctgattttactttgttcagaagcgtccttgcattgttaagaccggatgcgactgccactttcacatccatgcccgccacattgtaagatgcctctttgacaccttctgtgccgcggacatccgtaaagtccagattagccagttcttcgcctgtgagaacttcaactgcagtacgcagcgcagcctccataacaccgccggtagcgccgaagatcacggccgcacctgtcgattctcccatcgggtcgtcgaatttttcatccggcagcaccgtaaattctataccgcagcgtttgatcagccttgcgagctctctggtcgtgatcgcgatatccacgtccggaactccggctgcatcctgatcgtcacgtccgatctcaaacttcttggccgtacatggcatcacgctgacggaaacgatcttcttcgggtcaatgccctccttctccgcaaagtatgtcttcagcatagcgccgaacatctgctgcggtgatttacagctggacagatgctctgtcatatccgggaagtaatgctcgcagtatttgatccatccgggtgaacaggatgtgatgagcggcagtaccccgccgtttttcactctgtcgagaagttctgtagcttcttccatgatcgtgagatcggccgcccagtcagtatcaaagaccttgtcaaatccgactcttctgagcgctgctgccatcttgccttctacatccgtacccatcgggtaaccgaactcttcaccaagtcccgcccggacagaaggagctgtctgtacaacaacatatttgtcaggatctgcgatggcatcgaggatctgctgtgtgtaatccttctcatataaggctccggtaggacagactgcgatacactgtccacaggatacacagctcgtttctccgagtcccatctcaaaagcagaaccgatcatcgtatcaaatccacggttattggcgccgataacgccgattccctgtgtcttttcacacgttgccacacagcggcggcagagaatacatttattgttgtcacgtaccatatgggctgcggattcatccagatcataatgcgtcatatcgccctcataatagtctgcatcatccacgccgtattctttacataactgctgaagttcacagttaccgctgcgcacacatgacagacatttctggtcatggttggaaagcagcagctgaagtgttcttcttctggacgcgatgagctgaggagtgtttgtaaacacttccatcccttcattgaccgggtgcacacacgccgcgaccaggtttcttgctcccttcacctcaacgatacacatccggcaggctccgatctcgttgatctccttcaggaaacacagcgtcgggatcttgattccggccagccgggctgcttcaaggatagtagaaccggcaggagcggatacgtcgagtccattaattttaagattaatattttccatattctccatcctccattactctttgtaaatagcaccgaaacggcatttttccatacatgctccacacttgacacatttatcctgatggataacatgtggttctttgaccgcgccgctgatcgcatcattcggacacgttctcgcacataacgtacatcccttacacttgtcggcgtcgatcttgtaagagagaagcgccttacagacaccggccggacatttcttatctacgatatgcgccacatactcgtctctgaaatagcgcattgtagaaagtacagggttcggcgccgtctgcccaagtgcacaaagagaattggttttcagatgggctgccagctcttccagcttatccaggtcttccattgttccctggccgttcgtgatcttttccagtatctcaagcatacgccttgtgcctacacggcatggcgtacatttgccgcatgactcatcgaccgtaaattcaaggaagaacttggcgatatctaccatacagttatcttcgtccatgacgatcagtccgccggaacccatcatagaaccgatggcgataagattgtcatagtcgatcggcacgtcaaaatgttccgcagggatacatccgccggaaggtccgcccgtctgcgcggccttgaacttcttcccgttcgggatgcctccgccgatctcttctactatttcccggagggtagttcccatcgggatctctaccagtcctgtgttgtttactttaccgccgagggcaaatacctttgtaccctttgacttctctgttcccatggaagagaaccactcggccccgttgaggatgatctgcggtatattcgccagtgtctcaacgttgtttaagatcgttggcttctggaacagtcccttaagcgccgggaacggcggacgcggacgcggctcgcccctgtttccttcgatggatgtcataagcgccgtctcctcaccgcagacaaaagcaccggctccaagcctgatatcaatatcaaaatcaaatcctgactcaaaaatattcttacctaacagaccgtattcccttgcctgctcgatcgcgatattcagacgttctacagcgatcgggtactccgcacgcacatagatatatccctgggaagcgccgatcgcgtatcccgcgatagccatggcctccagcactacatgcgggtcgccttccagcacggaacggtccataaatgcgcccgggtcgccttcgtctgcattacagcagacatacttctggtccgcctcgttggcagccgcaaacttccacttcagtcctgtcgggaatccggcgccgccccgcccgcgcagtccactgtccagaatcacctggatcacttcttccggcttcatgctcgtaagtacagttccaagcgcttcatatccgcgtgttcctatgtattcctcaatattttccggattgatgacaccacagttgcgcagtgcgactctgtgctgcttcttataaaacttcgtctcctgcagcggaagaacttcttcgttcttcactgtctcgtcatacagcagacgggtgacaactcttccttttaataaatgttctgatacgatttccggaatgtcttcttcttttaccatcgcatagaaagaaccttccggataaacgatcatgatcgggccgagcgcgcacagaccgaaacatccggtcttaactacgcctacttcgtcttccagcccgtttcttttgatttccgcttccagcctttccctgattttctggctgcctgaggaagtacatccggttccaccacaaaccaatacgtgtgaacgatacataattcgtatacctccctttctatttttgtacagcgcctaatgtatatttcgcgactacctggccttctttcagatgaagtctgaacacttccatcgctttatcaggtgtcatctttacatacgtcactttttccttgcctggttccaatacttctacgatcggctcatactgacacagtccgatgcatcccgtaggtgtcacgctgatcttctcagacaggtgctcctcctggaccgcattggaaagtgcagtgagtacaggtctcgcaccgctggctatcccgcatgttgccatgccgacaaccactctcgtctgtgatgcactctcagaccgcacgccgactttactttcattcttctctcttattgccttcagttcttccagagatttcatatgcatcctccattcccgctatttaaactgatctgccattgtctgtttcttttttgttctcgtccagatattccttgataaatccggacacttccgcgtctttgaacgacacgctacctaatatttctctcatttccttcgtatccagcacaaattccttctcgtcataagcatatctataatgaaagtcgacaggttcattgaatacgatgagcgtatgcatcgtcgtattgatatcacctaacggcattctgtctatatgggataatccaaaaactgcttctactcttgtgccaattccttttccggatgtaattgtaaaccttccgcccgtactctccgcagcctgcttgaaaaacgggatcccaagccctacctttcgcgtagttctcgtcgtatagaacgggtctgtgacccgcttcacctgttcctcatccataccgcatccgttgtcgtcgatcactgcggtgagtgtatcggcctgcgtgcttatgagcacctcaacggttatgtagtccgcgcctgcgcggatggaattctccgccacatccagaatgttcagagatatttccgtcatcatgactattcatatttggccagaatgtcgtcgatatcgtctaccgtaagccttccgtacacttcatcattgatcatcatgaccggtgccagaccacaggcacctacacagcggcaggcatccaatgaaaactttccgtccggtgtacattcacccccgacgatgccaagcttctccatgagtttgttgtaaatgtccccggaaccttttacgtaacaggctgtgccaagacagactgaaatgcggtatctgcctttcgggcttaagttgaactgggaatagaaggtggtgactccgtatatcttttcaagcggaatccctgtctcattagaaatgatcttttgaacctcgatgggcagatagccgtagatatcctgagctctttgcagtataggcatcagggcgcctttttcatctttcaattcattgatcactcctaacagttctttttcctgttcttctgttccggtgaactgaactgttgttttcttagaaagcatttttttacctccctttactgtctaatttagtcatgtgactattacgttgaattaccatttcattctaacatacaaaaacacaaaaatctacacctttttattgtgtattttgttaaatgaaaaccattcttgtttgttatttgactaacatcctgttaaaaaacacacaaataaacgccgtgttttttagttgtttttcacaatacgtgttgatttccttttttctcaatgctatactatatttattaaaataagaagtgtacaggaggaagatatgataatcagaaagataaaatccttactggaagcagatgttttgtgcggggaagaatacctggacgaagaagtaaattatgccttctcatccgacatgatgagcgacgtcctggcatacgccgaagagcagtctcttcttctcacgagcctgtgcaacccgcaggtgatcaggaccgcggagatgctggatattctctgcatcgtctttgtccgcggaaagtatccagacccgaacatgctgaagctggccgaggagagaggcattgtcatactagccacttcccggggcatgtttacgacctgcggattattatacagcaacggactacttggaggtgcatgatacatggacgaaaacttgactttccactacataatatccggtgacgacttcacgagagccggggaggcaagcagtgatctgaaaaataagctcaagatgataggagctgacaataatgtgatccgcaggacggccatcgccatgtatgagggcgagatcaacatggtcatccacgccggcggaggagagataaccgtcgaaatatctcaggagaacatacgcatcatactggcagacaaagggcccggtattgcagatgtggaaaaggcgatgcagaaaggatactccacggcgccggaggaagtgcgcgcgctcggtttcggcgcaggcatgggacttcccaatatggagaaatattccgactgcatgaatattgactcagaactgggagtcggaactacggtaacgatggacattcacatgtaacttgacaaggaggggttccggttggataaatcagataaattttttcattccgtacatttagatgaggatgcctgcaagggatgtatcaactgtatcaaatactgtcccacacaggcgatacgtgttcataacggcaaggccaagataacgcctgaattctgcgtggactgcggccgctgcatccgctattgtccgcatcacgcgaaggtggcgctgtacgattcccttgaggagatcaaaaactaccggtacacggtcgcgcttcccgcgccgtcgctctactcgcagttcaacaatctcacaaatgtggatatcgtactgaatgcgctgatatccatgggctttgacgatgtgtttgaggtgagtgcggccgccgagctcgtatctgaggccacacggaaatacataagcgaacaccgggacgacgccccgtttatcagcacggcctgtcctgccatcgtaaggatcatacgggtcaaattccctactctgctgccccgcctgcttcctctgaagcccccggtagagatcgcggcagagatcgcccgtgcaaaagcaatagaaaaaaccggatatccatcggaagacatcggaatcttctttatttctccctgcccgtccaaggtgacttacgcccgctcgccgctcggtgtaaagaagagtcagatcgacaaggtcgttgccatgaaggatgtgtacccggtacttctgcagcatatgacccacgacgagagcaagcttactcctatcgcttcttccgggcgtatcggcatcggatggagcaatgccggcggagaatccgccggtcttataacagacaattatctggcctgcgacgggatcatgagtgccctccgggtgctgagcgatctggaggatgagaaattctacggcctgaagtttgtggagcttaacgcctgtaacggaggctgcgtcggcggcaccctgaccgtagaaaatccatatatcgccaccgcaaagacgaaaaagcttcaccgctatctgcccgtcgcgcagacacatgccagttcctatgaggatattgactatcactggtccgcatatgtggaatatgagcctgtgttccgcctcggcaattcattccgtgaaagcctggaactgatgggcacggtggaagatatcacggaacagctccccgggctcgactgcggctcctgcggagcccctacatgccgggcacttgccgaggacatcgtcagaggtgaagcgacaaggaacgactgtatctatgcattccacgagtatatcaacaatctgtccaatgagatcggtttcctgacccgctccctcaacctgtcctgtgggaacaacgacgagtcaatgaagatactggaagattatataaagaaacttacaaccgaattagagcgaaaggagcgttagttatgacagttcagacattgatcgactccggtctgtttaaggtgcaggtgccgggcggcacatccagggagatcagcaaggtattctgctgcgacctcctgagcatcgccatgagcaaagcgcctgagaacggcgcctgggtcacggtaatgggcaacaaaaatacactggcggtcgcgtcacttgcagacatttcctgcataatcctggcggaaggcatacagttccaggaagaagaactcgcatgcgcaaggtcggaacagatcgccgtattcaccacggagctttccatctttgatgcaggtctcaagatccaggagctgctgtcatgaaagggctctactatgaccttcacattcattcctgtctctccccgtgcggagacgacgatatgactcccgccaatatcgtcggcatggcggccgtcaaaggactggatgtcatcgcgctcacggaccacaattcctgccggaactgtccggcggcgctgatccacggtgaaaactatggcgtcaccgttattccgggcatggaacttacgaccgccgaggaagtccacgtcgtctgcctctttccctcactgtcagacgccatggcctttgatgacttcatatacgggcatatccttcctataaaaaacaaagaggctatcttcggaaaacagcagatcatgaacgaagaggatgaagtgaaccaaaccgtagagcggctgctcataagtgcaaccgacatatcctttgacaatgtatttgaacttgtggagtcgtatcacggcacagcctttccggcccatatcgacaagacaacgacaagcctgctgtccaacctcggctttgtgccgccggacagtaccttttgctgtgcagagatccacgacttcaaaaacctgcaccgtattcagcaggaacatccttattttctgaactgccgaatgctgagcagttccgacgcccactatctccccgacatacatgaacccgaataccagatctaccccgccggcaaaacggcggccgacataatcgcatatctgcgcacagccatacccgccgcagataactcacacagaacggcaaaggggtcaggccccttccaaaacaagtaaatccataaccatattctcacacggaacggcaaaggggtcaggccccttccgaaataagtaaacccataaccatattctcacacggaacggcaaaggggtcaggccccttccgaaataagtaaatccataataatatacttacacggaaggggcctgaccccagtgtccatccctgccaacatccccacatccccacaaaaacatcattcacagaaccggtaccccactccaatctctgtcagtataaatctcggatcggcggggtctttttctatttttcttctaagtgttgccataaacacgcggagatttcccgcgtcgatctcaccggaatacccccatatctctcttatgatatagttgtgcgtgagcacctttccctggttggcgatgagcagcagaagtatcttgtactcgataggcgtcagatgtacttcttcccctcctaccgtcactttccgcttcccatagtctaccagaagttcttcctttacaaatacggtgtctgtctctccggcacggatattcccaagcttgcgcattccgacccgcactcttgccatgagttcccccatatagaacggtttcgtcacgtaatcgtcagcgcctgcgtcgagcgcctcgatcttctctttttcttcctgtctggccgagacgacgatgatcggtatctcggacacttcccgcacattgcggatgacctccataccgtccccgtccggcagaccgagatccagaagaatcatatccggccggttggcatagaacagactctgcgcttcttccaccgtccttgcgacataataaccgtatccctctttttttaacgtcatggagataaagttcagtatatatttatcatcttctactatcaatattgtaatattttcactcataatacatccgcctgctctgcaggcagccagaatgtaaatctggctcccccctcacttctgttttccgcccatatctctccgccgtgggcgtttataacctgacggcatatggcaagaccgaggccgatcccccgcttctggtccatgctttcccccgacagggaaacaaattcatcaaaaatcttctcttccattccctcctcgataccggggccgtcatcttcgatactcacatacagccgctttctccgaaacgatgccgtgaggatgatctttccgccctcctgggtatgcttcaccgcattgtccagtatatttacaagcacctgcatgatcatcttgccgtccatctgcgccatgatcacctgctttggaagcacaacatgataatcacgctggccgagaccgatgacgtgacgctccgccccattgatgacatcgtctatcacctcaccgctcttttccacaaactgctggccgctctctatcttcgtcatattcagaatattgacgaccatcttcataagccacatggactgctccataatatcttttagaagctgcttctcttcctccctgcccatctcctccgaatctatgatgaggctgcagtcgccgaggattcccgtaagaggcgtgcggaagtcgtgggatatgctccgcagcatgctgctcttcatatgctcccgctccatctccactttcgtccgctcctgctccgcatagatgagctctctgtccagcgcaatgcctatctggtttgacgccgtcttcacaagcaggtcctgctccaccgtaaatccctgattgtggttgaacaccttcaatatcccgatctgttttacaatgccgatgataggaaacatcacatagtccttggaagtatattcgacagccgaatccgctcccttctcttctccgagcagttccaccacgctctcatatcccgtatgctcatagatataccggatcccgagctctatgatattctccttgcccgtgacattgatgaatttctccgacatttcataaagctgccttgccgtctcctcattctttttggaaatgagcatctgcttctgaaagcgcacggtcaggctggacgatatcacggcggcgataagaaagaagcccataagagccacatcgttcgggttcataatggcaaacgtatggacaggcactgtaaaaaagtagttgaacatcataacgctcacgaccgcgccgacgatcccgtactcatacccctgtgtacacgtacttatgatgagcacaccgaccatgaagaccatcagtacattttctttctccacacctacgcttttcagcacaatgcagacaatactggcggtcagtacgatgagcatcgtccgcaccgtatatatgaactttttatttttcagtatcttcttcatcttttccatgcacctatcatagcaccctacttaatatttgccaatattttatccacgtctttcttaagccccacgaccatcagatggtcgtcggcctccagcttccggtccgcccgcggcaggatctgcagatggccgccggactttattccgagtatgctcacatgatatttcgtacggacagccaggtcctgtatacttttcccgacccaggccgccaccggcgggatctcaaagatagaatacccctccgccagctccacataatcaaacacatggtttgcactgtgctttaccgcaagacgctccgcaatgtcccggtccggataaatcacttcatccgcaccgttgcgcaaaagaaacttggcatgtatgtctctgtttgctttactcacgacgtacctggccccaagctctttcacaagacttgttatctcaagactgctctggaagttggaaccgatacatacgaagcagatgtcaaaattacctaccccaagactcttgagcacttcttcattcgtacagtctccgatcttggccgccgtcgcaaccggaagcaggtcttccacattcttctcttccttgtctacgatcatcacttcattgccgagcctgatcatgtttttacagagatgatgtccaaatcttcccaatcctataatcaatactgatttcattttacattcccctttattatcctattataatgcgctccatcggttccttcaccggggcctctgtcttatgcccccgcagcgacagtgcaaaagtgaggcttccgacccgcccgcagtacataaggaatatcaagatgatcttagaggcatctgcaagcccccgcgtgataccggcggacatgccgaccgtaccgatggcggacaccacctcaaacgccgcgtctatgacaggctctgcctggatcgtaatgatcgccagcactgccgccagaacgagcagcaggtttgtacagagcacggtacttgccttccgcacagcgccgtcatccagcctcctgccaaatacattacagtacatctgatttcggagattcgccttcatatatacaagcagcacgacaaaggtcgtcgtctttatgcctccggctgtggatcccgggcttccgccgataaacataagtatcaccgtcaggaacttgctgctgtctgtcagcgcccctgtgtcgacggtgttaaaccccgctgttctggccgtcactgaaccaaacagcgaacaaagtatctttccggaagtgtccatgccctgcagcgtattgtctttttcaaacagatacaaaaggaccgctcccccgaagatcaggacgaccgtcaccgtgagtacgatcttcgtgtgcagacaatatctgccggcatgccacttatgtatcgatatgtcattccatacgaagaaaccgatccccccgataattatgagcagcatgatcacaagattgaccgtccagtcgttataatatccggtgaaggaagaatatgcctcctcctgtcccatcaaatcaaaccctgcgttacagaatgcggagatggaatggaagatgccgtaatagattcccttcacccagccgaaatccttctggaagcgcagcgccagaatgaccgcgcccgtcccctcaaatatgagggtccctatgatgatcttcttcgccaggcgcacgacgccgcctatctggagtatattgacactctcctgaagcgtgccgcgcgtccacagcccgatcttcctcctcagaacaatggcaaaaaacacaccgatcgtcatgaagccgagtccgcctatctgtataatagacaggatcaccacctggccgaacatggtccatttctgccacgtatctgcaatgacaagcccggtcacacagactgcggaggtggacgtgaacatggcgtcaacgaacggcgtcgtctgtccgtctttacttgccgctggcagcatcagaagcattgttccgcagaggatgatcaggaggtaccctaggacgatcatctgcgtatgagtaagttttttcatcatcacgctcatgctattgagacctcttttcccatcagcagtgcaccgagctgtgcctccacttttccgtccgctttcaggatctgtatgtggaacctcttgtacacgctctcattttccgcgtcattgcacacgctgaacaggtatcctgttccgtacatctttctcatcagattgcagagcgaaagattatcggcatccgagccggacagcgcgattatatactgtacattctcccagttctccctgacacagacatcttctatataaacggccgccactcctctgccggacagccatgcttccacctgtctccttaagcttccgctcccaaacacaacggcccggggcaagggctcctgctcttcctcttccttctgcagattccgctcttcttgtgcaaaatggtcgatacggaacatgagatacattccgtaagccattcctcccagtacgatcagtcccagtaaaatatttgccaacatatcatcaccttcttttcttaccttaagcatatacaatttctcgttaagacggtaataatattcatatatccggtattaagattgtatttagacgaaatagacagatggggtcaggccccatctgtctcctccagctgctttcttatttctttcaccttcccgggattctttcctcccgaatttatcccgatcacgatctcatccttctgcaccacagccgggaaataaaagtcacacagcgacctgtcgtccgccgcgttgaacagaatgtgtccgccgcatttttgtccaagcgccctgcactcttctttgacgcttctgttcacttcacggtcgtctgtcgcggccagaacgaggtgcgccccatttatatcaccttctctgtattctctgtgcaggcacgtgatcttcccttccgtctcaagcttcacaagcgccgcctgaagctttggcgctatgacagtgatatgtcccgcaaacgtaagaagcgtctccacccgccttgccgcaacagttccgcctcccaccaccacgatgttcttttccgaaaggtccacaaacaaaggaaaataagccttctccatttctttacctccgctcatccagcatgtacagaagcgcattgcagatgcatgccgctatgttgctcccgccttttctgcccgtggcgacgatggacggcacatcctccaattcaaggatcagttctttggaacgcactacattcacgaagcccacaggcacagcgataataacctccggcttcagcgcgccgtctctgaccagctcatagagccgcacaagcgcggtcggagcattgcctaccgcaactatcatttttctgtccagcgccgcggccttgtccatgcttgccgccgcccgggtcgtcccattttcctttgcggccgccgccacatcttcatccgacataaagcagagcacctctgatccgtactctgccagtttctttttgttgatcccggctttgcccatctgcgtgtccgtgacgataacagcgccttgccgcagcgcttccagcgcccgttctatgacaccttcggaaaacacaagattctttgcataatcaaaatctgcactcgtgtggatgcaccgctttacaacaggttctgtccccgggacaagcggtgtatctcccagctcttctgttatgatctcaaagcttctcgcctcgatctgcgcaggcagaacattctcaagcccaatatgttccatcatctgtcccctccttttaatgtcacgccgatgccgcatacgacccggtcgacccggcccgccgcccgggcaagttgtgtacatatgcgccccgtctgttctctgcaggcgcgctcaaactcatccacaggcacgagcccgcagccgatctcgtccacagttatgacgatgtccggattccttacggcaatctcccttgcaagtgcttccgtactcactcctgcctccatcatacgccgaacgagccgctcaaaatggcgtaccgccgtacatgtatatatgtcgtcaaagccgcagctgccgccgtccatccagcgcttgacaccgaatacacgctctgcataagccgtctttccctgacacgcccctccggttattactttcatatgcgcgccttcctccttttctgccgtgctgctctttacagcagcaggaatcccacacactacttccgtcacctgtccggccatctttgccagccgccggttgatctctccgagcgtctcccggtattccttcatgccgccggtccccgcttctccttcgccgaacacatcgtttgtaacgaccacaagaacccggcacctggaacacagtatctcgattccacggagcaccgcatccacagtgcccgggcccgccccttccggagcgtacatctcattggccgtcaggttggacatacattccagcaggacgtacgcgtccgctccctgcacagccgcctcatatacaggtccgccttcttttgcaggcgtctcgatggctgtgtagcactccacagtctcaaaccccttatcccggcgcatcgtgcggtgccgccggatcttctgcctcgtctccgcgccgaacggcatcatcgccgctatgtaaaataaccggccgggcttttgcccgttgttttccgcgtgaagcctgcagatgagatcttccgcaaatgcagatttcccgcttccgcttcctcctgtcacaagatacagcatcttatgtccctcctgtgcctatcgtcctcagttgtctgccgtcccgatatccgcatatctgtactccagcgctcctgtcgccggtatctgggcgattcccttaatgtccggccggatcagattgcagctcttcatcgcgtacagcggtatgatataaaactggccgcccaccgccagctgctccgcctcatgcataagcgccgccctggccgcgggatccgtctccgtatcagactgtccgaccagcctgtcgtacgcttcgtcctgtatgccgctgcagttgtatgtgctgttggataatagcatggaaagataggtgtagggatctgcgaaatcggctgtccagttcattctgcaaagctcaaaattaccggcccgcctctccgtataatttacctgcagctcctgtgcattcagcttgatatcaatgttcaggtttttcttaagctgctcctgaatgacctgcgctgtatcggaatccatctcgagcgcgggataattataagtaagttctggaaaccctctgccgtcctcatatcccgcctctttaaggagacgccttgcctctttcacatcctctttgaacggcttttcggctccgtccacaaaatattcgcctgtctgcctgtctttcatatattttgcaacaaagtttaccgtcggggacgtatccgccccgacgatcttgcagagctcctccctgtcgatcgccagattgatagcttttcgcacccgcacgtcgtccagcggcctgacgttcaggttcgggtaaatatatctcgtggcgatcgtatctgtgacctgcagatcctctttcccctcatacagctccatcaccgacgacggaagacctgtcgccacatccacctccccggtctcgtaggcgttggccatggactgctggtcggcaaagaagcggtacgtgatcttatcaagctttaccgcatccgcgttccagtattttgtattctttttcagcacaaagtactgctccggcacgtactttgccagatagaacggtccgttggacacactcgtcttggggtctttatcccagccgctggacgcgtcgtccgcatatgcgcagcaggaaggtgtgtacaccggcagtctgagcagatccagaaaatatacacaaggcttttccagtgtgaacgtaagggtatgatcgtcgggagtatccacccccagacttgcggcgtctgcctcgttattgtacaccgcctccgcgttcttgaccgggaagagataatttgcatatccgctcccgctctccggctttaacgctcttttgatcgtattcacaaaatctgccgatgtgaccggcgttccgtccgaccagaccgcgtctttccgcagatggaacgtccacacggtggaatctgcgttcacctcataagactctgccgcccggtactctatatcgccattttcatcgaaggtcagaagttcgtcgagggcagagaccgaatacgccagatacgtaagcgctatcatcccggccggatccagccctcccgtctcactgttcactgcaactacgatctcctttgtactgcctgccgtctctttttcctgtcccgcgcatccgctcagtgcgagcaccccgatcaggcacagcacggtcaaaacgctcactgttttcttcatgtgttttctccttatatctgtgatgtcatcctgtaatctttgctccgctttcctgtatacgcttccgaatagaggaagcaggagacctcgcgcccgccgaaccggaaacgctccggcctctttttaaagcagcaccccatggcataaccgcacttcggcgcaaacagacatccttcccccggatacgcctctgccgtctgttcttccctgcgcaggactccctttttccttctggccttcagcggatccggaacgaggatcgaggaaagaagcgctttcgtatatggatgccacgggtcgcggtaaacttctttcgtacgccccacctccaccaggctgcccgcgtacatgaccccggtccttctgctgatccgtttcaccacattcaggtcgtgagagatgaacaggcaagagattccccggttcacctgcagttcctccagaacctccagtatctgttcctggaccgccatatcaagtgcagagaccggctcatcgcacacaagcagcccgggctccgacatgagcgcgcgggcaatgccgatcctctggcgctcgccgccggaaaaagccgccgggtatttccgggcatcctcacgctttaatcccacgtaagacagcatctgtgccaccctttcccttcgctcctgacgggtacagcccgtatgcaaaatgagcggctcttccagcatggactgcacggtcatccggggattcagggacgtgtacggattctgaaagatcatctggaccatctgctttggcgctctgccccgtccgtccggttctccgccgtcatacaggactgtgccccgggtcggcttcaggacaccggcgatgatgcgggccagcgttgttttcccggaaccgctttcgcccacaagaccgaagatctctcccttttctatatgaaaagaaatatcccggacagcctccgtcgccgccctcttactaaagttccccgcttccggatactcttttcccacatgcgacactttaagaagcgtgccctcccctgcccgcacatcagacagcttctgaagttcccctgcccgggcaagcagttccttcgtgtaagcgtgctggggataatagaaaatgtcttccacgctcccctcctctgccagcgccccgtcatgcatgacgagaactctgtcacagagcgaagcgatcaccccgagatcatgactcacaaagagaactgccgtcccagtctcacgcctgacgcggcggaacaattccagcagctgcttctgcaccgtcgcgtcgagcgcggtcgtaggctcgtccgcgatgagaagctccggttcacacgacagggcgatagcgatggccgcccgctggcacatccctccggacagctcaaacggatacttctccatcagcgccccgccgtcacagatcccggccatgtcaagaagctccagcgcccgctcctttgcccgggcacggctgcactgccggtgcgcgcgtatcgtctctgtgatctggcggccgacttttacggtcggattcagactcgtctgcggattttgaaacaccatggcaattttatccccacgcacagaggccatcctccgctcatattccttctgcccctttccccgggacggcggcgtgatatcagtcccgccgagctccattctcctgcagacaacctgcgcgctgccgggcagaagcccgaggaccgctttcatagccgtacttttaccggaaccgctttcgccgacaataccgacgatctccccggacgcagtttcaaaagacagatgccttaccacttcctgccctttctgtccgtcataaaactgtacattcaaatcctgtatcttcagcagactcatcttaccgttatccttcctctgcccggcggacggccttctcaagccccgcgccgatcaaattgactgagagtatcagtatgcacaatacgaggatcggatacagcatctgggccggcgccacctgtatctggcttctcgcatcctgtatgagtgtcccgaggcttgcggccggcgctgagatgccgactcctacaaagcttaagaacgcttctgtgaacatagctttcggtatgagaaaggtaaggttcacaatgatggccccggcggcgttcggcagcaggtgcacaaagagcatccgtcctgttcctgcgccgagcagacgggcagctgtacagaagtcttccgatctaagcctcctgatctcgcctctcacaatgcgcgcaagccccacccatccgccgatgcagaaaccaagcagtatgctgcccgcgcttgctcccatgacgagcatgatcaggatcacatagagaagtgacgggatcgaatcgatcacatccgccgcgcgcataaggagcatatccgtcctttctcctccgcagccggcagcgcttccatacaagatccccactgcgccgcatataacggcgctgccgataccgatggaaaggctgatcctcgtcccgctgaacacacgcacgaaaatgtccctgccgaacttgtccgtcccaaagagatgggccaaagaagaaggggcattgcgcagtcctgcgttctgagcagtatccgcgtaaggagacaataccgggataaggacagccagcgctgtcatgaccgcaagcagaatgattcctgtgacaatcagcgggtttttccttagataagctttcatctgcacgtcctccttactctcgggtccagccatgctcccaccaggtctgttatgaggttgatgccgataactaccgtacccatgaataccgtaagcccaaggatgagcgtataatcccggttcgcgatggaagtgacgaactcgcgcccaagccccggaattgtaaaaatactctctgtcacaaagctgcccgtcagcaaaaacgcggcggcaggcccgatatagttcagaaccggaagccaggcatttttcagcacatgtgtaatgaggatcctgcgccttccaagtccttttgccctggccatcactacatagtcccgtttcatctcctcctctgccgcattgtgtatcatcctcgtgatgacagaggcgggatacacggcaagtgagacgaccggaagcacatagttcgccgcccctgtaagcccggcgaccggaaggaacttaagcttaacgccaaacagcagcgcaagcaggagggcgatgacaaagttgggcattccggtcccaagcatcgtgccaagaaagatgccccctttcaccgccttcctttcggtgactgcctgccagactcccataaccgtgccgagcacgaccgccagaagtatagccagaaagccaaggaaaaatgtgacaggccacgcccgggcgatcacctccgcaacggatgtgcccggttttttgtaagacatgcccagatctccccgcaggagattgccgagataggtcacatactgtccgcccgccggtttatcgagaccgtattctctttccagtgaccgaagcacagattccgacacattcccgctctggaacggactgcccggcatcatcctcgtcagaaaaaacgcagctgtaacaagcacaaaaagagcaaggataccaagcaatatccttctgcatgtgtatcttcccatgaagcttcctcctttcgtacgccgcacgtctccctaccggccgtgcctccccagttcttccagtatctgttccgtcatgctgtccatggacgcctctttcgccgtgctgatatgcatgccgtactttgctgcctcctccgccgtctgcgctccgatacagaaggcatggatgctttgaaagtccagttgttccatcgtctgcacaaatcctttgaccgtcgatgcgcttgtaaaagtcacggcatctatcccaccgtcttcaaataaggactgtatcttctccttcacctgcccatgcgtctcgtataccgtctcatacagcgggatatcgtccactttaagccccgcttcgagaaggggcggcagaagttcctcagaaccggacatggcacggaccgccgtgatcctggcgcgtggctgcgcacaagcggcgaccgcttctccaagcccggcggcgcagtacacatccggcacgacgtcggccagcagaccgtaacctctgagcgctttctctgtggcagagccgatggctgcgatcttcactctggcggacttgccgaatatatgtctcacatccagcttaagctctgccagctgttcaaaaaatatccggacgccggccgggcttgtaaaaagcagccactcttccccggcccggtctccaaaccgcttcatcgcgcgctgcagcgcgaaattaggcgatatggacctcgttgaaatagacggaagttctatgacctgtgccccgagacttctcagctttcccgcaagggcagagctgctcatccggggacgggtaatgaggatctgccgtcctccgagcggccgttcttccgcccagcaaaactgctctgacagcgcacacacttttccgacgaggatgactgcgggagtcccgatgccggcccgtcccgcatcctctgcaagacgtcccgcggcagagacgacacgcctctgcgcagcgagcgtccccttttcaagcacagctgccggggtatccgggtcaagtcctgcctctatgagtccgttcaagatgcgctccatggaagtaagccccatgagaaatacgagcgtcccctccacattcacaagggaagcatagtcaagcgtttccgtcccgtcctgcctcggatgtcctgtgacaacgtggaaggaggaagcatgatcccggtgggtgacaggtatgcccgcataggcgggcaccgctgacgccgacgtgatccccggaacgatctcaaacggaatgtggtgtcttaccagaagctccagttcctctccgccgcgcccgaatacaaaagggtctccccctttgagccgcagtacgtttttccccttctgcgcttcccggagcaggatctcattgatctcctgctgcatcataagatgatggcccgagcgtttccctacgtttatcacttctttcccgggcggtataagactaagtatctccgcactgatcaaagcgtcatagacgatcacatccgacgattctatcaattcccgtgtctttacggtgagcagtcccgcatctccgggacctgcccccgcaagccacaccttacctgactggtccattctcttcctcccgtctcatttcttctgccagagccgcgccgagctgtctcgctctgcccgtctcccctgtccttgttctggtccggtatatatcgcctccgcagtaataaagtcccgtgagcttaagctccgctccctgggcctgcgcatgtgccgcgacgggagacgtgcatccgccgccgagcgcagccgcaaactcgcgctcggcctctgcttccactctgctctttccacacgcaaaggaagaaagccaggaataatccctcccttttcttccctgcacagccagaatcccctggccgacagccggaatgatctcatcaacgctaaacactctccctgccacttcctccatatggaggcgcttcaggcctgccgcggcaagcactgtcccgtcaaacccttcctctgaaagttttctgagccgcgtctgtacattgccccgaatgctgcggaacgtgcacgacggatacagccgcttcagctgaagttccctgcgcctgctggaagtgccaatgacaccgccctccggtatggaggtccgccccggcttgtagatgagcacatccctcgggtcctccctctcgccgaatgcaacgataggcaggtcttcgggcacttccatcggcacatctttcaagctgtgcacgcagatatcgatccgaccgtccagaagggccttctccagctccttgacgaagagtcctttcccccctgccagctccagccttctgtccagaattttatccccctccgtcttcatcgtcacgatctcagcctttatgtcaggacagtttcgctccacggcctgctttacgatctccgcctgttttacggccagccggctttcccggcttccgattcgtattatcgactgcatgctgcctcctttccattctccagaatgtcatatactgcatccatatccagactttcccttatgaccgccgccagcttatcatactgttcttccttgtaagccgcaagatcgcgcggctttactgcgcttaaaccaagtccctttgccgtaagaagcgaacggacaaaaccggccgatgtctccggcaggtcgaacagaccgtgcacataacagccgtacacatttttgcatacagcgccgtctcttatcaccgcgccgttctcttcgttctcgatctcaagaaacggccgcaccccttcttcacagaccgtgcgtcccatatgtatctcatatccttcggccggcagccggctcatgccttgcagaatgccgtccacggaacagatccttcctctgaccctcgttcttgttttttcccgttcaaacacggtgcgcaccggcaggaggccgattccggccacagtacccttacgctccactccttcagggtcacagatctcctgcccgagcatctgataaccgccgcagatcccgaacaccgtcttcccttcggaggcatggcgtaagacctttgcctcaagcccgttctgcctcatccagagcagatcttctatcgtattcttgctgccaggaaggaggaccgcatcgggatgcccgaactctcccggcgcggacacataacgcacggatatttcctccatgcactccagcgccataaagtccgtaaaattcgagatgcgcggaaaacgcagtacggcgatatcggcgagaccgccggattctttcttctcaaaccgctctgtcagactgtcttcctcgtcgatatccagatgaaaataagggatcacgcctcttaccggcacgccggtgcgctcttcaagcatcgcaagccccggaaggagaatatttttatctccccggaatttattgatgaccattcctttgatccgctgtctttcctcctcttccagaagctccattgtcccgacaagctgagcaaacacgccgcctctgtcgatgtcgcccacgagaagcaccggcgcgtccacaagcctggccagccccatattcacgatatccccgcttttcaggttgatctcggccggactccccgccccttctatgacaataacatcatatgcatccgaaagcttgttgtaggcatccagaatgtgggggacgagctcttttttacgccggtaatactccgcggccggcatcacctccgtcacttctccgtttacgatgacctgagagcccatatcgctcgtaggcttcagaagaatggggttcatcaggaccgaaggctccacgccggcagcctccgcctgcatcacctgggccctgcccatctcaagcccctcccgcgtgataaaggaattgagcgccatgttctgtgatttaaagggcgcggtcctgaacccgtcctgagcaaatatcctgcacagtccgccggccaggatactctttcccgcattggacatcgtcccctgtatcataatgcattttgccatgctctacctcctcctttacaaacgccccgaaatgccttccacgcatatttcccgcagcgccttaagcagcatatcattctctttacgcatcttcaccgctatgcggtaatatcctttcctcagcccctcatagttggaacagtcgcggatcaatatgttatgttccttcagaagcgcagacagatcgtatcggctgtacagaagtatatagttcacggcagacggataatacgtgatgcccatatgctccagttctttttcgatcctcctgcgctcccgcgccacatacgctcttgtcctttggacccgctctgtctccgacagcgctgcaagccccgcggcctgggcgggcaccgacacattccacggctgcgtcacaagctccatcttctcaagaaacgcccggtcggaacagataccgtatccgagccgcaggcccggcatggcatgcatcttagtaaacgcgcggagaagcaggacccacggcttgtcaagaaccgcttctaccggaaggatactgtacgaccgctcgagaaattcgcagaaacactggtctatcactgcccgtatgccaagttcaccgcaccggccgataatgcggtcaagcagcggcaagtcaatgacctggccggacggattgtccggcgagcagagaaagatcatatccacatcctctgtcaattccttcatataccgttcggtcagccggaagctttcttcttcccccacatagtggtacacgacttcacagcctgccgcctcaagcgccatggcatattctgcaaaagacggcgcagtgagcaccgccctgcggggacgtccggcaaagaccgcagaaaagatgagttccgcagctccgttcccgaagataaaattctcttccgaaataccgtaccgctctgccagcgcacttctgagcttcctgcatctgctgtccggataagcgccgatatgcgcggcttccgtgcgcacagcctcaagcacctggccgcttggcccaaacgggttgatattgacagagaagtctgtcattccttcatatgtatagatatcaccgccatgtatatattccatcatacctcctgctgtgatgcggggcagtccgctcccccgtatccgcgccgctttgcggcgcatacctttttgtcatgtcagcctgtgagcaccgccgccagcctgagcatcccaaacaggaagaacgacaggatggcggtggcgtacataagctttccggctctgacgatatcctccgcctcagccggtcttatatcatcgccgatatatgctttggggtagcgcacaccaaagtaccacgcgtcccccgcaaggcgtatgttcagggcgcccgcgcataccgcctctgtctgcgccgcgttcggactggcatgcttttttctgtcccggcggtagatccgccacgcactgcggccgtccatcccgagaagaaatgccgcggcggtcataaacagagccgacagcctggccggcacgtagttgagcacatcatccatcttcgcggcgcatcttccgagatacagatagttctcatccttatacccgatcatagaatccatcgtattgaccgccttataaaagaacccgagaggcgctcctgcgatcatcatataaagcagcggcgctgtcactccgtccgacgtattctctgccacagtctcgaccgccgctcttatcactcccgcctcgtcaagctttgccgtatcccttcccacgatcatagagacggcctttctcgcctccggcagacttccttcctttaacttcccgtatactttcctgctctcctgcccaagcgatctggccgccagaagctggtaacaccagaagctctccagcacaaaacgaagcaccggatgaacggcccccgccgcgtatagaagcagacacggaacggccgccgacagagcggccacagtgatccacatgagcactcccgccgttatgagccggcgcttgttatccctgcacacttttctggacagatgttccagaaaggagataaaccggcctataagcctgaccggatggtacagccatatcggatcgccgcatatgagatctagtataaatcctgtcagacaggccatcaacgtaatcataaaacctctatctccgtaaacacatttcttccccgtttccattcttcttcgtccagggtgactgcatagcctccgccgttctccggctgccattcgtaaaagccccgctgctttggatcaaaacgggacaggaccgccattatcgtaccaccgtgcacgaccatgccggcgcgcctgcatccttttctcatcaggcagtccgccgcccgggaaaagccgctgacacagcggtccttaaacgcgtcatggctctcgccgcccggaaagggaagttctccttttgagtcaagccactcccggtaaacaggcaggtctttcagttcctcataattgtgcccttcaaacaaaccaaaatcacattcccgcagctcgtcaaacagcaggggggtcctgcccgcaaacagcagggcggccgtctgcacacaccgcttcatcgggcttgccgccacatactccacactgtcgtggtctttcagccgcctgcgcactgtgcgcacctgtgtctccaggtcttctccggcaagttcctcgtctgtccgccccacataccgcttctctttattgcccggcgtcggaaaatgccggatcatcaaaatcttcataatatcctccctgccagcacgatacacgtaagcatggccagttcacagacctgcagaaaataacctgccaggtctcccgtgacgccgccaaactgcctgacgcacacagatctgtaatagagaaagctcaacagaccggccagcacggacgctgctcccatcttctcgtccagtacaagggaaagaacggaaaacacaaggatcagcacgatcatcacgacgcgcactctcttcctgacagccgcagcctgaaaggtattcgcaaggccggtatctcttgccgccttaaatgtcacgactgacagtccgctgagcgctctggagatgacataaccgcagccgatcaccggaagcatgtccgcctcagcctccgtccacaccgccacactccacagaagatagcagcacagtccgagaatggcgaatgcgcctgcatgcggatccttcaaaatggccagcttcttctccctgtcaccgtaggagccaagcgcgtccagcgtgtccatgaaaccgtccatatgaatcccccctgtcacaagtacaggaagcagtgtcatcacgacggcgaacaggaacgctcccgcccccgcccgcagcagaagcatcccggagacaacttccaaaatcccggataccatgcccactgccggaaaaaaacacatagcatacttcatatttttctcctgccactccacccgcggcacagggattttagaatacatggaaaatgcaatgaagaatgattctaatatatacataatggttcctctattttaacctctcatactgttccacattgatttcttcaaacgtgctcatccggctgtaaacgctaaggcccatatcgagaagcggaagcaccgctacggcgccgcttccttctccgaggctcatatcgcacgtcagaaacggcgacagatggagcgcgtcgagcagcatcttccccgcaggttcctttgacacgtgggacgcaaggatgtaatcggccgccgcggggacgaggcgtaccgcgcagagtgccgccacggcggagataaacccgtccactaccaccggcacatgcaggagcgccccgccgagatatactcctgtaaggccggcgatatccagtccgcccaccttggagagcacatcggtgacatcctttctgtccgggccgtgcaggcggatggcccggctgataacagagatcttccgttccagcccctcgctgctgagtcctgcccccttcccggtcacttcctccaccggtctttgaagcagcaccgacgctacggcgctgctcgttgtcgtattgccgatccccatctctcccgtagccagtatgtcatacccgagcgctttcaggcgggataccatatgtacgccgacagacacggcctgccaaacctgctttggcgtcatggcgggctccttcagcatgttcctcgtcccatacgccaccttctgcttcggatctgtgactgaggggacatctgtgaccattccgatgtccaccggaaacaagtctgcccccgccacctcgctcatgagcgccacgctggccgctttttttgtgaaattatccgccacgatggccgtcacttcctgcccggtctgtgtcacgccttcctcgaccacaccgttgtccgcgcacatgatcacaagtccctttttctccagggtaaagaggggctcccgcttcatgcccgcgatcttcacgatggcatcctcaagcttcccgaggctggacagcggctttgccacagacgtccaccgcttcccggccgtctccatgctttttcggtccgccggttctattgcattttggagatactccggtgtcagcctgtccggtatctgtattgtctgctccatatcatccttcctttcctgtccacgtcctgcagcatgcggcaaaccgctgggcgaacgaaggattggaatagaaatgcacgtggggaaagcctgcaaacagatttccctccgcatgaacgcacttccacgaccgtttcttatccggcttcaccgccgtgcatccgctcccgttgtccgtgctgtcataataatggaactcatgccctcttaacacctcgccctggccgaggaaactccccgctttgccggcggacagctccatatacccgaaccttacgagccgctccttccttcgtgcgcttgcctgtatcacatccgccatcgggtacatactgccgtcggcgccttccatctccgtgtgaagatacagaaagccgccgcactctgccagacatggcagaccggctttgaccgcactgctgatacttcggcacatatctctgttgccggacagctctgccgcgtagagctccgggtatccccctccgaggatgagacctgagatcccctgtggcagcgacgtgtcgtgcagagggctgaattccacaagttcacagccaagctcttctaacagctccagattatccttgtaataaaaacagaatgcctcgtctctcgccacggcaacttttacagaatgtgatgccggtctcccttcttcctcctctgcttcacagcctgcttcttcccccgctttccttccgatctccagcagcagatccaggtcgacggtctcagccaggagcttcccggctttgcgaagctgttcctgaatgtcctgaacctcccggggaagcacaagccccaggtgccggctctttagccggaacacctcgtcttccggcacataaccgatcaccggtaccggaaaccctctctttgacagctcttcctctatcatctgcttcatgcgcggaaacagtccgcccgatatgcggtttaacagaattccccggatattgctctcctcacggaaggtaagggcaccgagaataagtggaacgagggacagcgccgcccccttacacgggactacaagaatggccggcacgtcaagggtccgggccacctcaaaagaacttgcccggtcggtgtcaagcgacatgccgtcataatatcccatcacgccctccagcaccgtcacctctgcctgccgtgcatgtcttaaaaacaacgttcttaagacatccccggacaggaaaaacaagtccagattctctgattccacaccgagcgcttcccggtggaacatcgggtcaatataatccggaccacatttgcaggccgccactttaagcccccgcccggaaaatgccgacatgagggccgccgctatgaccgtcttcccgcttccgcttgacagagccgttatcataaaccttgcgttttccatcacctctgcccctttccgtccgacacgacgtacaccggattctgcgccgacatcatatgatacctcccaagcttcctggcacgtgacgctgcgatctgcacgatctccggatcgaaaagaagtccatcctctgccgccttcatcacttccccgaccgtctcaagcgacgcggcattgatcacgataccggcgcctgggttcttctttcttaccgcgctcaaaatcgccttcagattcccggagcttcccccgacaaacacatgtgtaggcgcctgaagcgcatgcactgcatccggagctgtgccctctatgatctcgatattatcgcacaggaacctcctccggttctcttccagaagacggaccgcctccggattcttttctatggcatacactttgatctccccggaacaaagtgctgcctccacagagacggagcccgtgcccgccccgatgtcatacagcaccgcatctttcgtaaggccaagctttccgatgctcacagaccgcacttccgactttgtcatcggcacctcaccccggacaaacgcgtcgtccggcagatggaccgccacccttttatccggcgaaggattccgcacaaatgccacgtcaagcccttcacagtcttccggcttaagctcccttcccgttctgtgtactatggtctcgtcctcataagaaagccgtctgccgatccagaattccacgtccgccagtccataatatcgtatcttttcacagagcgcttctgcgcactgcgttccgccgagaagcaggaaggtcttttcgctgcgcgcgatcgagtaaatatagttctggcgcctgccgtgggcgctcataagcgccgcgtcttcccagctcacgcctagtctggcggcaaggtaggcgacagaagagacgccagggatcagttctgtctcatattcctccagttccccggccagcgtctttgctccgctgtaaaatccacagtccccggacagagcgactgcaatatgtctgtactcactgtgttcctctatgatctctttgattctttctgccttataggcatggtacgacggcttcccaaaacgggacaacgcctccgtcatgcggtccgcgccgatgatacagtcacagcgctcaagcgctgcctgcgcctctccggtgagagaggcgctgccccccatgccgatgccggtcaggctgatcttccgtctgttatccttatgcatttccttatacattgcggtatcctctcggcgttaccatactgccgtctatctgttttgtctgctcgttgccgatatatacggtcgtgaacatgtccgcctctgtatccttaagctccgccagcgtcatgacctgccgggcctctccatctcttccgatattccggacagttccgcagactgtatcgtctcttttatactccagcagtatctcgcatgcccgcttcagatgatctttccgcttcctgctggacgggttatacaggcagatgacaaagtctgccatggcggctgcacggagtctggcctctatcttctcccacggcgtgagcaggtcgcttaaactgatcaccgcaaaatcatgcatgagcggagcgccgagtacagccgcgccgccggtggccgccgtgatcccggggactaccttgatattgacgtgcgggtatgcgccttttatctcatacatgagcccggccattccatacacgccggcgtcgccgctgcacacaagacttacatccctgccctgttctgcctcctcaaacgccatccggcaccgttctgcttcctgtgtcataggcgttgtcaaaaatgtcttgtcctgatattgcccgcgtatgaggtcaatatataccgtatatccgatgatgacgtcacagctctccagcgccttgcgggcttcgcctgtcatctgttcaccgccgcccggaccgattcccaccacatatacactattcatgctcctgccctccggccgccgctttgcgaaattcagtgccaaatgccggatcgtacagttttgaatgctcatagctgccatccagcactctgccgacaacgatgagcgctgtctttgcgatcccttcctcttctgcggtctctgccagcgtctccaccgtacagcggcatacgttctcctccggccacgtcgctttatagacaacggccgccggagtatccccgtcatagccgcccgccatgagctccgcctgaagcgcagggagcatgcccgtgctcaggaatatgaccatcgtggccccatgcgccgcaaagcttcggatcgactctccttccggcaccggggtcctgcctgccattctcgtgatgacgacagactgggagatgccgggcagcgtatactctgcctcaagggccgccgccgcgccgcaaaaagaacttacgcccggacacacctcatacggtacccctttttccgccagagcgtccatctgctctttcaccgccccgtacagacacggatcgcccgtgtgcagacgcacaactttttttccggccgccgcgccgtctacgagcacttccagcacctcgctgagcgtcatgcgggcgctgttgtatacctcgcatccctccttcttcacatcgagaagcgctggatttacaagagaacccgcgtacacgataatatcagcctctttcagaaatttctgtcccctgactgtgattagatcactggctccgggacctgctcctacaaatacgatcatctgtctcactccttaataatcatcaatgaataataacctgcgtcgtccgggatatcctccacatcctcatatatacgctcatcgggcataccgcagttttccgccatccgcgccttaagtcctctgtcctttaccgcctgttttacagcgggcatcttcttccccgccttcatgagcaccttcgtcccgggaagcccgagactctcttccacgccgtaggacgccgggatgatgtggatctcttccctgttttcggcaaggcctgtgtccatcctggcggctgccgcgcagaaggaaggtattcccggaacaaggcacgttctgtacccttgtcttttcagacgcttgtgcacatacagacacgttgaatatacgctcgggtcaccgagtgtgataaacgcgatctttttcccctgcgccaggatctctccggctgcatcggcacattcgtcgtggatctttttcagcttctctttttccttgatcataggcatgggcagatagagcatttctttttcctccatgccgggcaccgaagggagcgcggtctgataggcagtgcaccttttcagatatccgccgtgttcctccctgcgtacagtgtcatacaccggcctgtccgccgatttgtccgacactgccaccgcgatgacctcgcactcctgtatgatcctgactgctttgagcgtaagaagctccggatccccgggccctacgcctactccgtaaaatatcccttccatctacacagttcctttccgtatatgttccagtatctctgccgcacgtgatgtctgtccaagtatcccctcttctgcggaaaacacgatggcgccggtcatcaatgtctttccggcgcgctgcttaagatggacatcgatctgatccataatggtctgcatgacaggctccagcatattgctgtctttcagaatgtccaccgccccggccgtagtcacacattccatcaactgccgcaccgtatcccgggatgcccccgcgagggcagcgtgggcggcaaacacttccatccggcagtccgcctgtctggaatgggtattcatcacgccggcggctatcttgaccagtttcccgatatgcccgacgaacaggattcctttcatgcccatcctgacggcatcatcgatcgtctctccgatatagttgctgcattttaccgcaagtctgccgtcatatttcagtgtctctgtcagaaaatcactcccgtaattgccgggcacgatgtagcaccattcatgaccgttttctttcagcactttcatttcgagacagatcgtatccgtgagcgcccgctcactcatcggctccacgatcccgctcgtccctagcacagagagccccccttcaattccaagtcggggattgaacgtcttctctgccaaagcctccccttccggtatggatatgatgatgtgcaggccaaaggtacatccgaacttccgtctctgctcctccaccgcctccacgatcatacggcgcggcactttattgatggcggccgcccccggcggctgatcgagccctttcttcgtgactcttcccacgccttttcctccgtccagactgactgccgtccccgcgcgccttgccacttccgcaaagacgagcacaccgtccgtcacatccgggtcatccccgctgtccttgcggactgcgcagcttacacggtctgctcccatgtcaatacactccacgtccagatagagtacggtcccttggggagtcttaagagacacctgatataccggctctttcgacagcagcatgaaagccgacgccttcgccgcagcagccgcgcagcttccggtcgtataaccggtgcgcagcagcttctgatctttccatacggtctgtgtattcctgccgtctcctttcatccggatgctcctttctccaggctacatgacagcctctatgtgctctgcatagatatttcggatccctttcatctcgccaagccctttcacaagcgttctcacctcataaccggccgcctcaagctctgtcttccacgaatcatcctcccccgccatgtcatttttggcatggtctcctgccactaccatgaacggcatgagcatgacttttttcatgcccgagatctccagtctggtcatcacattgcgcaagtccgggaaaccttccaccgtccctacaagtacctgactgtacccgagggaatgaaaggtatactcaagcgtaggataggcggcattggcgtgatgatccgtaccgtgccccatcaggacaagcgcctccccctcttttagctccacttccgccatcactgcatggatcgccttcttataatcatccacacttgtcagcagcggtctgccggcccggatcttcttaaatctgtcggtatattccatcaggtcttccatcatcttgtcattttcgatcccgtttatgatgtgggtcggctggacgatgacttcctccatcccgtctgccgccatctgctccatggcgccttttaccgtaaaaatatccaggtgctgcgtcctctttaatttcctcaatatcatctgacttgtaaacgcacggtatacgcggtatgtgggaaatgcttcttctatatgccgctccacctgctcaatactctttttcagcgcatccatatggctcgttccaaagcttaccacaagtaccgccctcttcgtctttccttccatcatcttccctccgctatatattgttccagctgctcaaaattcacaggcggcctcaagtctttctccagaacccccttttctgcgagacgccaaaaaagccggagtacggccggcgcctcctggttcgcaagggccagctcctccctgctgccgcacaccgttacagggtccgcctgaagcagtaccctcccctcatgcatgagcacgatctcatccgcccattcaagcgcatagccgatgtcatgtgtggccatcaatatggtgatcccctccattgccagtctgtccacgatctcgttcatgagcttcgtatgctttgcgtcaagcgcagacgcaggttcatcgagaatgatgacatccgggtgcatgacaagaacatccgcgatggccacctgttttttctgccctccgctcagtgcatgcgccggacggtcccggaacggcgtgatctccagatcatccatcacccgctctatctcacttcgcacctcagcctccggaagtcccagattcataggtccaaaagagatctcctggtatacgctcgccagaaacagctgatcatccgggtcctgaaatacgatcccgactttgcgtcttacatccatcagtccttttctggaatagtccaaaggcctgcctccaatgaatatcgtccctctgtccggtttatggatcccattgcagcacagaaaaaatgtagactttcccgagccgttggcccctaagaaagcgacctttttccctcttgcgatcttcaggctgacgccgttcaatgacggccggccgccgtcctcgtacgaataataaacatccttcgcttctacaatgatatcttcagccgtctcttccgcttctttcctcatatggttctcctccatatcacaagtgccagcagtataagttcaaataatatgatgcctgctatttccgccggccgcgccggcctctgttcctccagcacccggatcgtcccgtcatagcaccttgactccattgcgtcgtataaagcgccggaacggcggaacgctttgatcaaaagcccgcagcccatctgtccgaaggatctcaccgatgtcctgagatcccggtttccaagtcttgctttctgagatacgagtatggcggacgcagtctccatcagtacaaatatataccggtagatcagaagcatcagttctatgatcaccctcgggcaccgaagccggttcaataccgacataatgtctgtcatcgtcgtgttgagcgacagaaagtacagacaggagaccgccgacatggctgtcacgataaggcgcacgccaaatatgaccgaatcccggcttcccgtgataaaaaaggcgcccaccggtaccgcataggcatccagtgggactttggaaatattcacgataatggcaagtgtacttaagataacaaacgcaagaggaaccgccataagccgtatatagcgcccgggggcgataccgcccttcctcacggtcagaaagctgtttacggcaagtacggccgctgaaattagaaacatacggctgagaatgcagaacaacaatgacaacatggaaaaggcaaatttttctcccgcatttacatacctgagctttgactgatagcaaagcttgtcaacaacgatcatatactgctcctctcaccggtgtctattccttctttgcctcatcgcctctcagccattttcttcgctctacaaagcgtcccatgagaaaggcgattatgccgacgccgatccccgtctgaacacagaagaccagactctctatttcacccggcagttctcctccgagcgctgtctccagcaccggggtgaaccacggtgtatattctccgttgatctcttccaccatcacgcttcccgcatcgtctgaaccgccaaactcgcctcccttcagagcaaataacggaataactgctatcaataccgcggcagccaataatatgatcactgtctttgtatttttcgtcatcttatcttgcctccttcaaaaaacctattgctttcagttccggtcttgcataggattccaggccgatcactatgacaacggtcagaatcccctcgatcacggcgagtgaaagctgggtgggcgcgaacactccgaggaattttacagcggaagccgcaaccccgccggactcggaaggataagcaatcgcaagctgtatgctcgtcacgcaatatgtaaagatatccccgagacacgccgccagaaatacggaaacttttctgttcattttacatttggaacagagcttatagataccaaacgaaagcagcggtcctgcaaccgccatggaaaatgtgttggctccgagtgtcgtgaggcctccgtgggcaagcagaactgcctggaacagcagcacgatgacgccgagcacactgaccgcagaagggccgaacaatatagccccaaggcctgtccccgtcatatgtgagcagcttcctgccacggatgggatcttcagggaagatatcacaaagataaatgctcccgccatcgcgatcaatgttatggattttctgttttcttttagtctttttttcagtgagatcagtccggctgccagaaacgggatacagataactccccatgcaacgcagaaagctgcagggagatatccttccataatgtgcattgcattcgcaaccggtgtgacggcaaacataagcgcaaaggctatggctgccttgagtaagattttttctttttttgacatgtttttctctctccattcgtggttttttctgaaaatattccaggcttaccacaaagtcaaaagagattcgcagcaaacacctggtcatatccccgtaaccatccaaatccatctaaaagcgggtgttctgacttaggcatcctcacggtattccgccttcccataagtatacttacagtgacctcatggaataccactcctccaatacagcaacgggtattgtgcaggattctcacctgacttcccctgccgccttttttcagacggccttcttttaaattgtctgccggatttgaactaattcattatgaattttatcataatccttctaaataatcaatcagatatgtcttcgtttcttccaggctcaggccgctctcttttggccttcctacgacaacgagcacagccccggtctcccccgccgcctcttttttctcttcatagccgccggccttccctgactcctttgtcacaaaatacgcggcgtccgtatacttcagcatggcggcattcagttctgcggaaaaggggccctgcatggccatgagatgcgcgcccgtaaatccaagcgctgcactttcttccacagcctccttcgtggacagaacacgagcgtaacaccggtccctgtaacccgcgatctctgtgtagagcttaagttccttactcccggtggatataaagatattgccctctgtctccttcagatagtccaccgcttcctttacagaagcaacgtacacgaccccgtcctcgtcttccgctgagggctgcctctttcgcacacaccggatatatgcggtaccgcacgccttgcaggcgcgcctaatattctctgtggccactctcgcgaacgggtgggtggcgtcgaccgtcagcgcgatatcgtgttttctgataaaccggcagatctcttcctcattcattcttcctgcgcatacggtgatgcttccgccctctcccacacattctttcccatattctgtggcggtactcacatatgccttcgccccctgcccccttaaaagctccgccagttctcttccttctgttgtccctgcaaacagcagtatctttgcgtccatccttttctccttctcttaaaaagacagtctgcacctgtctctgacgagggcaaacgtggctccctgtgcgcatatcttaggctggataagctcaccgtccggacagaaacgaagcgccgcccgctcgcatacattgtccacgcccgtcacccgctccacaaattcggaatgggagctgaccgctgataccgtactgagctgctctgccgtaaatgtctgaaacggcacgccgtattccgccgccagcgcaatgaggcccggctcctcttttttgagctctatgctggcaaatgctgccagctggccgggcaggatcttgtttgcctcaagcacctccgcaagtccggctgacagctgccccttctctgtccccttccggcacccgacgcctgccacaatacggggcttgtgtctcaaccgcagaaccatatcttctgccgttccttccctgctgtccgactcgtccacgaccgccaccgcatacgggtaatacttaagttccccgggggctttgcacagacgcagctcctccggcacagggccgtccacagggaaggtactgtaaaacccgatctcctcctgttccagcactgccgcggatatcttcttcgcaagttccctgctctcgatcgtaagcccgttcttaagcgcaaacacatcgacggcaaactttccctgcacatcggtcgcagtggttatcaccggcacgcccccggtatatccggctatctcccgcgcaagctccactgctcttcccgcatgtcccgaaagaagcgggataatgtactgtcctttttcatccatcacaatgaccggagaatctgtgaatttatcctggacatacgcggcaataaagcgcaccgcgattcccgccgctccgatgaagagcagcgcctccttcccccagagttcccctataagccccttcgcatcctccgggagcgggcgcagtccataccggccggcgaacaattgcggcgcataacaggcgcaggccgtccgctctttggcatactgtctgcaaagtgcggcgctgagcctgctgcctgcatctgtaaaactgattatcgttaaattcttatcttctttcatggctgtattgtaagtaaaaatgctgtgaaagtcaagtacgccggcgcggtcatccttcccagacaacgatctctccgcacgcgatcttcgcgcctgagccgccggagggctgcgatctgaaatcatccggcatatcgtggacgatcaccgttctcccgatcacctcttccggataaaaacgccccgtatatacagccatccaggcgatgcctcccttcacgagcagactcggcagatctcccgcgtgtcccggatgctctttcttccccggattatagtgtccttttgcccctgcgaaggcatcctgcgcgtttcccgtacaggatgtgccctcgtgaatgtgaaagccgagaaaccctccggatgcctgttccgttttttccggtatgccgtagacttccgccacgactaccgtgccgccgtatgtactgtaaaaataaacattgcccctgatatcctcaagtcccggcgcacctttaagctttgcgcgggctgtcggcatttctcttataaattcttccaatattataaccctccactcctgtcagatattgagcctgcttcaatatgatatgccttaatgggcataatgtttcccgttttgaaatataattacacaaatcatcgtacgatacggagccgttatgaaatatctctcatcatacaaaaaatggggaaaagttctgtttatctttgcagcagcctttctggccggtacgctgggcgcaaaggcagcagaacattttacaggagaaagcgtgcagaccgcggcggacggaaactggggattaagctttcaggaggacggacagccgccggccggcaatgcgacagccgatgaactgaagaagtttgacgctttctttaaaagcgacacggaagacaaagtgatctacctgacctttgactgcggatatgaaaatggaaacaccgcccccattctcgacgcgttaaaaaagcataaagtgcctgccactttctttgtcgtcggcaactttatatctgaaaatccggaactgatcaaacggatgaaggaggaaggtcacatcgtcggaaatcatacatacacgcatcccgacatgtccaagatctccacgaaggaagcattttcagacgaacttggaaaagtagagactctctataaagacatcactggagaagagatgacaaaatattaccggccgcctcaagggaaatacagcgagggcaatctgcagatggctaaagacatgggatataagacctttttctggagtctcgcctacgtggactggtaccaggataagcagccgaccaaagaagaagcttttgacaaactgctgaagcggatccaccccggcgctgtcgttctgcttcacagcacctcttccacaaatgcgcagattcttgacgaactgctcacgaagtgggaagagatgggctacagtttccagccgcttgacaaactgtcaaagacaaaataactctcccgcgccagttacaggcatccttgcaaagcagccgcatctctgttattgtaataacagatgaggaggtatgtgtatcatgttggaacgtttgttaaagtatccgggatttatataccgcatagacggaaccttttattatctcggaaaatggatctgtaaagaatgcacggatacagaggcgtcagattgtgtgccaatgtatgaaatgtgccgctcggagaaggaagatgccgaggcgggaatgtatttccataagatccgcgcctacagtgatttcgccctggatatcccgtacgatccggcgctcatccgggaacatatgactgctcttgtggacggactttccccggatgccagaaaggatctttgcggccagcttcagcgctttgaggaagatcacggaaaatactgcgggaaactgcctgcataataaaaacaaaagaatcctgcactcgatacagtatgtgtatttgtgtgcaggatcttatttttattaagttgttgtctctacatgggccgctttctgttccccgggctgtctgcagactgacgcgatatagcgtacgagcgcatataaagtgagcacagcagctattatcgtctctatgagcactacatagtttagaaacggcagcggtgtccccatatttgcaagacatgccgccgtcatcttcatgccaatggcggtaatgacaaacgggaacgtaaatgccgcgtaacttggataaaatctcatcttcagaaaagccgggagcctgacgagcaccaccagatagatcagcgtggaaagtatggccagaaaacttatcatcacaactgatctcggctgtaccgactgtatatatcccgccagacaaagacttgccggcgctgtataaatacaaaacagcggctgtaccggttccggcatatttttatacttcatataacggtatgtaacgagggccagaagcacaagcagcgcggcaaacccaaaccagaacaaaaccgttccggtccccgtccttccaaatgccggcgctgtaacgctggctgccacaattccgacatatacaatgtaatagctggcaaatactttcgtcatatcaagatgaaccataaactttgcagtaaaatagacgatcagcacaatatgcagtacaatagcggcataccagataatgtccgcgccactgttaaggtacggcttagcatagcccgccagaagcatgagcgccatcgtaaaagtaccagacacgcttgccgtgaccggattcttcatatcttccgcaaactgtttcggatacaggatcactttcataagtacaagaagtcctgtcacagcggcaatggccccgcagacaagccgcaccccttcggagtaagactggagcagatttccgagggccgccataccaagcatgacgcctgtcacaggcagagggattctttttatcacaactcttccctccctattcgtctgtattcttgaggcctttttcgcggatgatcatctccgcgacttttccggccaccattcctgtaaaacgtacacactgctctttgtgctctccctgccccatatcaaattcttttgtcaggatcctgcagcagagtgcattcttcccgcttgcctctttaaaccagtcgtgcagttccttagacagcctcatcgtctcttccacctgcgggtctttctgtaccgttctcccgaacacaaggccgatcgccataactccacctgaaactgctccgcacaaacattttgaccgcccgatcccgaccggaaatccggatgccatagatatgacggcctccggtacatcgatctcaaaattgctgcggatggaacttacgacagcctccgagcagaaaaatccgtttctgaacagatcctccgcatctttcgtgatctttgccacgctcacttcactctttacattcatgaatccattcctcctgctgcgttttttatcatttgcattacagcatttattctaccgtatcagagcctggctgtcttattgatttctcatacgtacggatggatttattgattaattctatacgttatgcatcaggaaacgttttattcccctatacagatactgtccttcgtgaacgtgacgatatcccccgatctcagcagcgaatactcttcttttgagacggtgcgcagcgccatgccccgtccatacattttctgtccgatcaacggccccagcgccagtaccggttccgcttctatgcataagattgccgccggggcggtgcctgtctttaccatttcaatgagcacaccggaaccggaacaggatcccctgtcataggggatacacagtatcttccccgtaagattctctccgcgcaggtcgtgatggacgtcaatgatctctcctgacgcaggatctaccccgccccagaagctcagagggtcctgtgagacaagcgcctccccttttacttccccttccagcagcactttaaagtcttttatctccttcatgatcacgcctcctttggtcttgttcctgtgacggctgcctctacacagcctgtcatatccgccatcgttatcttcacgccattgatcgcaggtgcatattgagcggctttgcccgaattcgtgacaaaatgcctgccccgccagatgccgttatattccatctccatcagacaggtgtctctcacaagcatagcgccggccttttctattacctcgacatacccggcaagtgctgcaagctcatagatcggatggctcgtctggatccagaattcggtcccttcatgcacttttttcccttctatcccgcacgcaatttctttgatctcctggaaggacagatgcgggcatcccatcaaaaccatatccaccttttccgtatccccggtgttgagcctggccctcatctgcgcgacttctgcaggtgtgatctctactgtctcatatgttgtctttccatggaacgccgcctcaagagtgggcgcctcgggtgtcaggcccactgcatggaaaagactggtcgcccctcccgacgccgcggcggctgaaaaagccttcagctgatcgggcatagtgctttccggaagcccgagcacaacaggaaccctgttgaccgcagtctccccgaccagataacctaataccgcgtaatcgaccgtgtcccggaaagcgctgccgtcaaacccctttagtgtgaagagaatttccccggcccggttttcttccagatacagcccgtactccggtacccgtccggccacggcgcagcacacgtccaccagatccggcaggcgttctgtcctggctcctacgactgaattcacatagtttactgcatttgattccgaccagcttacattttcgccaaagacaggaacgttcgtgcactggtatggcgcgcacgtccaggtcgggtttacgccaagtttcatatatgcctttctgagccgttcacatttttccgcaaatgcttcagaggtatactgttccctccatctccttgtatccatggacatcggattgatggtcgtgggaaccgacacctttgcccctttttccgctaaatattccacaaattcagtccctgcatcccaaattgtcgtgtaggccgccgcatcaatgtgcgcgttctttaccggcagaaatctctctgccccgtaaagtccgcccatcttgacaagaatttcaattgcagcctgcatgccttctccatatctgccgtccagcatttcctgttcatattccgttaattgcattcttccatctccttttcttaaaatatcttgccgtacagaaataaaacctttatattattaatcatacaaggtttttctgactttgcaatttaaagaaatttaaggagctattgatatttttaaaggataaaaatacgaggtcactataaaatgaacaaatacaggatcatactggacgtatataagacacacagcatatcaaaaactgccggaagactgaattatacgcagtcagcgatcagccaggcgatcaaaaactttgaaaatgaacttgggtttcagatattccgccgctccaaagcaggtatggagctgatctccggcatggaagagatcatacagtctctggagaacatctgccatgaagaagacaagctcagcaagttcgccaaaaacctgacgagtctggacagcggttacatacgcatcggctctgtacagagcgtctcctacaactggctgcccaatctgatcaaggacttttccgacaaatacccgaatatccgctttgaactcatgatcgacggaatcgctcctcttaaagcaaagctggacaacgaacagctggactgtgtcttcacttccaaatatatgctgcccggttatccgtttaaacagatggacgaggatgaaatgatgctcgtcatgccggaaaaccacaggctggcaggaagagagaccatctctgtgtcagagatcgattatgagaattttgtcatgtcggcaaacgggcttgatgaagaggcaggtatcatatttgaggaaaatcacattatcccgaaagtacagtatgagccgacggaggattttgccgcgctgaaaatggtggaactcggattcggcctcacgatcatcccgaagctttttttggccggcaccaccttccgcgtatatgcctgtccgtttgaagagcattactccagaatacttgggatcgcatacgctccggacaaaccgctctctcccgcgacccggaaattcctggattacataaaaacgtgggagctgccgcggcagtacagaacttaggacgtctgatcctgcgtattctgcagtgaacaaaaaagtcccggaccgcttctggttaacagctgtccgggactttttttatacaggggatgagggaatcgaacccccgccaaaggttttggagacccctatcataccacttgaccaatcccctaagtgatattgctcactagatatttatatcatatgtcaggctcgtttgtcaatgaaaatttgtgctcactgggcactcgcttactcttccatttctacgagcagataaaaacctttttctgtcttctcgatcttcctgataattccgctgcgggacttgattctctcggatgtcctgtagatgcctgacatggcgatggacggctccaccaggtatgtgtactgtccggtcaccgcacttctctcgctcacctctacttcctggccctcttcgaccagaccttctctttccattttaaaacgctctgttctcatatggggtcaaactcctttttcacatattaatttttataatgtccgcaagattatattatactctttcgcacatttttttcaactttccttctgctcagatacgacagaccagagtcacctcatacttggaacacttttgacctgcctgccgaccgtgagccgcacggtgcaccccgcgcccggagcagagtctgccgtgactccatagtccggtccataaaggagcttgaggcggccgtccacgttttgcaggcctaccccatttttccgggacgcatccctgccggccggcgcagcagtatcgaagcccacgccgttatccgtcacggtaaagacaagacggtctccgtcctcctgcaccgtcacagtgaccttcccgggtccgtccatcggcttgataccatggtagatactgttttccacgaccggctggagaatgatctttggtacggtgtagtccatcagttcctccggcgcggatatttcatagctgagcttctcctcataccgctctttttggatatacagatactggcgcacatgctcgagctcatcggccacggtgaccatctcccggccgccgccgagggacagacgaaagaaagcggccagagacttggtgagggcgatgacctttctgctgtcgccaaactctgccatccagacgatggtatccagagtattgtagagaaaatgagggttgatctggctcaccaggacattgagctccgactgccgcagcgtcttttccttctccgagacttcttccatcaactcccgcacacggcggatcatccggttgtaattcccggcaagcagctccatctcggtaaatccgtgcctgtgcacgctgatctccgccagcttttcgatctcatccataccccgtttcagatcagctacgggcgcggccagccggcgggtaaagagaacgcacagcagcagcacagcgccaaaaagcagtacgccggtcagcagcaccgcctcaaacagctgctgttccagcatgcgcagggtatccaaagacaccacgcccaccatggtccagccggcattctcgatccgcgtctggtaggtgagcatattctgctctttgtcgtaactgtcgccttctgccagaaccgcctgcagctgtttctgcttgtccgggtcggaaaagtagcttgtgtctttgtcatacaccagttcacctttgtcattgaggaggaacacgtagccctccgtccccagatccaggcggctcagatgatcctcaacaacactgtatttcatatccatcagcaggacgcccagattttcaccggcggctccggtgatctccgtgctgatcgagatcacccagttatccttgtcgtcggaaaagctctgcatccgcgctccggtgaggacgggcatcgtgttgtggatggattctatgtaccagtcctccttcatcatatcctccgaaaccgacatatcgaggtccgcttcgttggagaggatgcgcccatccttggagaccacgacaactgacttaatggcgctgtcattgtgaagcagggcgccgatacgggacagcagaccttcccgcaggccttcatcgttcccggaaaggtattgccggagcgtagggtcgctggcaaagacgttagattctcctttgacgcgcgcgatataggtggaaaggttcgttccgcttaacttcagcagctcatgggttttggaaacagtctcatccatcagcagattgaccgagaagaaatagactgccccgctcagaatcaggatgactgccagtcccgtgcccagaaaaaacagaggcagctgcacgctgaaccgccggagccagccgtgaatgctacgcttcttttccatgtcccgcctccgttctgaacgccgtaggcgttttcccatatttgcgccggaagcatacgctgaaatagttcggatcatcgatgcccactgccgccgcgatctcgtaatttttcatccgtgtggacaagagcaggatctttgcccgtccaagcctgaggtccagaaaataatccctgaaatttgcgccgaaatgctttttaaacagagtgctcaaatagctgatgctgtaccccagctcgtccgccatagcgctgagagaaaacccggcgtcggtcagatgctcctccagagatttggccatctgcgcacgtacaccggcatcaccgccggcaccggcgtccgccgccagcttatttacttcctgccgcacaaccgccagactgtccgcttctttctttttctccaccagacggaaaagaagcgtctggatatcgtcccgggagagcggctttaacacataatcgtccacccccaccttgatggcgcggatagcgtaatccagataatcataccctgttatcacagcagtcttgacggaaggatcccgctcctttgcacggcggcagaattccagtccgtccattttgggcatgttgatgtcggccaggatcagatcgatctgttctttctccaaaatggcgatggcttcctcgccgttttcggcctcaaaaagcctgctgataccaaggccgtcaaaatcgataaacgcccggatcccccggcggatgatgctttcatcgtccacgaccagcagctgatacataccgccgccccctttcctttccggctctgtctacgctccttcgcatcgggccgattactttattttttattatacagcaccggaacccacagaacaagtctgtgagtcccggtgcctcttccactattcaaaaatctgaagcagatatccgtatccctcggcctctaagtcttcatacggaataaaacggagggaggcgctgttgatgcagtaacgcagtcctcctgtctcggcgggaccgtcttcaaagacatggcccagatgggagtctccggcgcggcttctcacctctgtccgtgtcatgttgaattgtgtgtcggttttctccgtcactacctctggaatgagcggctttgaaaagctgggccagccacagccggagtcaaacttgtcctctgagctgaacagcggctctcctgtgactacatccacatagactcccttgtcgaattggcctgtatactcgttcgtataagggcgctctgtgtcccctgactgggtgacgctgtattgaatatctgtcagcttctttttcagatctttgtcgcttggcgccgggtaatcttccgctttgatgaggctggacagatcggtcttacccaagccctcttcttcaatgaattcatcggcatcgccgagattgatgtggcagtatccccccggattcttatccagataatcctgatggtaatcttccgccagataaaagttatcgagcggcatcacttcggtggcgatcttctttttatagttctcctgctgtctggcaactgcggcgtcagcaacatccttatcggcttcatcggtatagtagatgccggagcggtactggctccctctgtcatttccctgcctgtcgacactggtaggatccaccaccttaaaaaatccatctaaaatctgttccgtcgagatgcgggacgtgtcataaactaccttgactgtttccgcgtggcctgtgttcttgtaacacacttcctcgtaggtcggatcttccgtcgttccatttgcatagcccacatcggtgtcatatacgccgggcagctttttcatgtaggcctcaagcccccagaagcagccgccggccagataaatcgtatgcagatcttcttcttttaccgtcattttttcttcctttcctgccggcgatcccccggcgtctccttttgtgttcgttgtattatggggcgcggcggaacagcctgccaaaaccgtcataatgatagccagtattcccacgcccggcgatatcatccatctttttttcataacgttctcctcctttctgcctttattctacgcccggccgggagagattgtaatggaatggctttcgatgttcctttgatttcttgtgagtgtaccgccgtggtcctgacatataagccgcctacacccacccgtaaaacgggctgccggcggaccggctcttaactatagtatttccttcttttttccgtttcttcaggttcttcttcatctagttcttgaatctgcacactcccttttcccggtagggtctccagcaccttacgtatttcattttgggctgcgggacccgaagtcagggaaagacttaccattagaatgagaaatatacttataatcctcatgtcagcatatatttacattttgtacatgatctgatatggaattgattcaattgtccagacgtaccttctgattaattaatgtccatccatcaggcaataatatagatgaagtcagaacacaaaaaagaaaagctataataagaaaaggaagcaaacggattcccttagggatttctgcggtcaatggggctgcgcatatattcctcgttatagtttcattataaggattattttctgaaaccgcccatggctcatttacagttgtcttgtctgataattcataaaaattataagcactgcacaagaacacattcatagttaagcacacagcaaaaagaagcatgaggaaagaaactctaatgcgagacagatgatttttcatattattcttttccattatacataccttcttttattcacagacactgctgcacaaattccacagggtgttggatgatctctgatacctcctcaacagtaagtccttgagataaataacgttttgcgatcacttccattgattcaccaatctcgatcatatgataatcagggtcatagatcctgacgactctttgctgccattcatgcttcttaggagaatgtacaagctcaacttctttatgcttctccaaaaggtttaaaaactcatcaaaatcatctacttcaaaatacaactccatattatgtgaatttctaataacagagtcagggtcgatatcagtaagccatgcaaaatcttgttgtatcgcaaacccaccgctaaaagtcacatttctgcctaaatctaacacaacttcctgctcaaagagctctttgtaaaattttttggacacttcaacatcctggaccgccaataaaggtaattcaaatttcattttatacatccttccatttaataaataatcttccgttcaacagtgacagtatttatgatgcacactttatttccagcatcttttgtatatcgcaataatgagcttcaccggtaactcgataatgaagccagccgccatccccacaaggatatttattgtcgatacattctttcgtttccttctccatctgatcatatatcaaatgatattgttcatttgacaatcggatcataacggtaaaggcgccattctccgcaaacacattgcagatcaactttttcttctttctgtgggcaactgcccagccatagttatttccatagggaaaagaaatctcctgcgtagtattacatacatttaacaaccattcatttattcggacaaacagttccatacctttgccgcagtacgcggccatgtcatcaaatgccggtctattctgtttgtcaagcattctttcatacatgatcttccccctctgtcccttaaggtgtcacttttgcctttcgctttcaaaaatgcagtttttcagatgcgctcggcatgtatctgtgcatttatataccattctccatcatcttttaccgtaacattctgccaatgaaatttatcatcatcgatcttgacaaaaacccactttcttttttcatcatttatgtaagtaagaactatcatttcgtcttgttttcttgcttcaagccgtattattttcccagtataaccgtaagctacatcccatgtatgcgtatcaggattgtagatacgaagtgaggttccatattcataaccgggcaggataatgacatcctgcactgccattccttcaagaacccatgcaaaatgccattcaccttcgattgtacgggaattatcactctcaacatagttaattttccaactgccgatgagttttccaaaataattaaactcttcgggcagcgctgtgttttttctttcgctcgtgagagcttcaaaaaaatctttcatatattaactccctttcatattcaaatttccagacaaactggaagttgtaaatcaaacaatattctcacccaagattattttgggcattgtggttaaacacctattccaacgtttatagaatttttctataccaagttttccaactcttgcatgagcttcttcattttccagcacccaatacaagacatatgttaccttacctacatttcttgtaagacgaacaggtaattctccctctttaactgcattgaaatctttttgtcggtgagtacgttttatatagtgtacatcaataacaccatcttgctccaagtaaaattctgctacttccctcatcagttcttcgatttcatctaacttggtcagttttgcctcatatatgcatatttcattaaacataaaatacctccacaactttcaacttgtatttatacaggtttaatcaaatggtgttcaaaaaatgtttcaaaggtattcgcagcaccaccatgttcaacaatttttccgtctacgactttatcaatatccacccctgtaatttccaaaaccttgttcgtgggtgttattccaataaattccccttcgtgcgttcccctcataataaattctgaaataacataatcatctgctacatattggcgaataattttcatagtatagtcgggataggtgtttttcaattctaaaaggtgttgcctcattccatctattcctataaagatttctttttcaccagttttctgcatacaattttctgatatatatttagaaagctcatcaagttgattttctgaaacgataacctcatagaaatattttacaatctctttattatccatcatgcacctctacaactttcaattttccttaccacaagctggaatttgcaattatattaccaaataaacggaatcagtctatacctcgtctgctttgtatattcaaaatacccgtctaatccctctttaagcatcctatcctctaacgctgttcgtattataataatcacagcagttatcgccatacatatccagacacttacatagggaaaaatcaaggataatccaatacagtttaatattagtgcactatatgccgggtgccgtacaacgctatacggtcctgttgtgcaaaccttttgatttctgtctctttgaattcttgctgtagattctaaaaaagtattttccaaagtcgcttttgttgagaaccatgccgcaaacaaagttaaaccaattcctgaataatatgcagcatttaagtgctcactattttcagacataccagctaataaatatactccaaagtaatttaatatccaaaatgcaaaaagaagtatcttatcccatatcggagaatctgtattcgtttttcctcgttctgccaatgtttcctcatttgctttgaacagaatcatacaaattataatagttgccaagaaaagataaacaaaatagactatgcctgcatatgtcattgtaaatcccgcaccaatcagatacagtaaaaaacctattatcttttgaaaaccaactctggcaagatatgaaaaagcttgttttttcattggtgtcacctcgcttacaaatacaatttttccgttccgacagactggattttgacacattacttcttgatatatctttgatttttactgttgggtttgtctggaattgtacgaattacaagtcccatccttagcgccggatcaagatagttttttcgtaaagtttccctggatttaattcccagcatctgcataatcgtcgctgcgctatacggaacttcaaagtccattacatgaagcagtttctttacatattcagataatgtatcatctggtctgcgaatctgagttacagtctcacctacaactgcatcaatctgtttcagcataaattcaataaaaacatttgagctgccattcacatgacagtctgcaattgctttgtaatatccatcttggaacttctctatctgactttctatcggtatatactcaaatacggaattccacttggatagaatcacagtatgccataaccttgctgtcctgccgtttccatctgtgaatgggtggatagatacaaattcatagtgaaacacggcgctcataataagtggatgaaccacatttttattctttttcatccacaaaaataaatctgacatcaaaccttggacaagatgtgccggtggtgccataaaaatacattggtccccattaaaaactccctcatcaccatttcggaaattcactgcgtccaattccagtttattagccatgactctatgaattttttgtaaatcctttaaagaaaatgcattaaccgactttatcatctcgtaggcttcatatgcattttttacttcctgtatctcgcgctctggtcctagcacaattcttccgtctatgacatcttttacttcgcccatagaaagagaattggcttctatttttaaggatgaatgaatagacttgattcggttgtttttcctcaaatgcggttttgcatctaagttatggtatacattaatttcccccagtttttctgaaatggatgctacaagattaagcatatcttctgttatggaatatggaggtttgtattctttcattttatcacctcatcttgcatattatcttgcttactatcttaccacatttttcaagaaatatcactataaattcatattttgtccttattcctcatccacctcgacaaactgaatataggagagtatatttaaaaatgattcatattgctctataaaatctatactagaggtaatcagccataccgaacagtgcccacagaagtaccagatgcgatagaatgtctgcggcatccggtacttcgttttcaaatctgttttatacctgattcacattggttttaaatttctattgagcctgtccaccatccaaataattctcttttcacgtccagcgtctgtctttgcatcaaggtatgcccgtgtataagttttctttacagatggagacatagcctgaaaatttgtgtaagcgggctcgtacccttccaacaatgcggacaggcaggcaatctgttcctctgtaatgattgccagagggtttgaagcctcccactgaccattcttcttggcctcatctatcttcttcctgccaaaatcagtcataagccctcgttcctcaaggtttttcaccaatgctttattcttttctgaccatttactgttctttctccgcagtgaaaaatatttcttataagtcttatcatcaatcttttccatctgtccgtcgatccagccaaaacaaagagcttcttccagggcctgccctgcttttatagtttttggcccgccagccttaccgaacaaaagccaaatgccatcatctgtaagacaatgctcacggagccattcacgaaattcttctctgttggcaaatttcattgtttcgtttatgataatccctccttatcgtttgccgcgccatcacaggcaggcgatgctcccggcaccgccgatctgatcacagacatattctacaaattccagatttaaagccataataatcaactgccttttacccagcgttcgcactgttcaatccgcttgccgccatcgccctgctcttcgtcataggcaaactgtttcagcagggcgcaggggaattcaccgcactgcccgcagtgctcatgccctctggtctcacagcagtcttttacaggacagctgtctccccaaaatggcttgtcaatatgtacacatcccttacaacccatttgttccctatatccgcactcactgcacagaataccacatcttgattcaatcataatacaatcctccaattcctgtctttttgtgtatcaatatagcatgaattcatggatctgtattgaagaaaaacgacatggatcatctgctctccagcgcttccagtctcgcctgggacggccacaggccgtggaagcgcttaaactcattgagcagatgggactgatccgcatagccatatctttccacagcctcctgtacgttgaaatgctcttttaggataacctcccgccacacattctgataacgaaccagactggccgtccgcttgatagaaatgccaacctcctgtttgaacatccgctccatctgacgctggcttacggcactgtatccgcagatatcactgacccgggcccggccttttgaacgcagcaggtattcgatggagttatacagattcggattatatccttccggctgaaaaatgcccagcaggtacgtttccatacatgcgatcagctcctcaagagagcggcagtaaagcagtttttcaaactcagtattgcacccgggcatcagcaattccaaatccaaggcctgattacataaaccattcatatccagtttcagaaaccgccgcaccgcccaaaagggaaagcggaccgcgaagcgtaagactgcctccttctcttttccctgtcctaccataacagtatcatcctgaatcccatacagcatacttttgacagtctgcttcgtgtagttcatgtcgataataatatctatgcatgtatccgggatcactcggatcagctgttcatctctgtctccttctataccttccgacgaccagaagcagcgtacatagggccgcagcggtttgcaagggatatgttcctcataggtcctgttttggaggaatggccgggcggtcagcgggcggtattgcgttatgaattttggcgtcatctatttgtcctcctgttcctagcccgccggtggcttttaaaccaaacatactaaaataattatatcaggaagctgcggtttacgatacctttcatctgtcttttcactctgcactttcattccttaagcgtaaaaataaagctgtgtcgcctccccggctgctgtcaaatatattcttccatcgtctccggcacagacctgcagaaatggttctgattttattcttaaatgttcttccacactttggacaacgccacatctccttactcctctcaaagataatgtacattcaatccagcgcttctacggtaacaacaacactgtcgccaggctgttttccaatcttctcccggatatccctgcgtatcccgatgatatagcagatggatccgtccctatttttaatccccatatttacaatactgccgtgatagatcacaccgtcaaaggtgatttccgctttcacccggcctctcccgaattctttccggatatcatacgggaaacgcacataggccccgcccttatcgggaacgggctcaatcactgcatgaaattcataaacctttctgtccatcacttattttctcccttccttctgcaagcctttccctttgctgcggcgtacgtaagattttttccataggttttccttttgccaattcatcaacgagtttgtccagataccgtatctcccgcatcagcggctcttcaatatcttctacccggacaccgcagacggttcctttaatcaggtatctgtccggatttggccgcggcgcgttccggaaaaagtccccataggtcatagaagacgccgcggctttcttaatctctccagccgaataaccggtcagccagttaatgacctggtcaacctcattcatgcttctcccctttctctctgccttacttaccaagagcggataaatttttttaaaatccatattgtatatctttccgttgtccatcagaatgtctccttcttcttagtctctttcctattctgtctaaagtgtttaataaaaaatagttgtttttccagctggttataaaaacaatataaaggtttgtagagacaagtaacagttttttactatgccactcttaatttgacccgtacgaggcgcagctttaatatacctttgacgaaaaaggcgcagaccgtactattccaatctaacaggtatctcaatttgtgtaatatattcgtctatggtgtcaatgacaaattcattgatacccgtttcatacgcaaacccatataaagaaaatccttgcttatctacataagcaagaatttctttatatttgtcagaaattttatcccaactgcctttataaaaggcacgaagataagttccggagggctgtaagtgaagcccctttttagaaataggatagggtatttcaatgtaaagggaggtatattcgtcaaattttctctgataaagattttcaacaggaagcattgaaccataggaagcgtcatgcaaacggcgaagctgatacttttttgtttcggtaatgacttgctcgatctcttcgtcaaaagatgaatctggtgttacaggaaccgtcacaagataacagctttgtttttgtacaaggctgatggtggatatatccaaggaacgcagcatttccatatcctgttgatgattacataaaaccttttgcatggacttcaaatgagaaatggtctggcttaattccgcaattttgcttttcaagagataatcgaaactttcaatggtgcgatggcccataaaacgtttgatttcatccagagatacattgagttcacgcagcatcaaaatagtttccagtgtggcgctttgctgatagctgtaatagcgatagccatttttcttaatgcaggcaggtttcagcaaaccaatttcatcataccacattaatgtctttttattgatttcatggaggacggcaaattgtccgattgtaaacagtgtatttttttcttttagcatttttgaaaaactcccttgaccgtacagtaactgtacggtctattatatgcaatatacaaaagaaaaacaaggaggattttctttatgcaaagcgaaaatgcctacagtcagcctgttacgttaaaaaatgttttgaagtttgccattccaaccattgttatgacagcctttatgtctttttacacaatggtagatggtttgtttgtttctaacctgatcggaacagacgctttatctgccgtcaaccttacagctcctattattgcactggtaacggcggtttctaccatgcttgccacaggtggaagtgcggttattatgaaaaaaatgggggaacaaaaaacaagagaagcaaaggaagattttacatttttaatcatagtcaatgtgattgcagggtttgtcatgtcctgtttaggctatctgatgatggacacgatttttaaaagtctggctctgtcaccgaaagtattttcctactgtcagctttatttgagccgatatttgatttttactattccaattcttttgatgaacaactttaccctctatatgattgccgccggaaagtccgcactttctatggtgtgctccattgcgggcggcattttaaatatgatgcttgattatatatttattgctctgctggatatgggtattgcaggagcagccattgcaaccggcctgggatattctgtaacagcagttgtgggtatagtgatgttctccaataagaattgtctgcttcactttgtaaaacccgtataccgttccaaaactttgctccatgcttccacaaatggcagttcggaaatggcaactgcgttggtgacaggtatcgttaccatgatgtttaactggacaatgctgaaatatgtgggcgaaaatggcgttgcagcaattacaattatcatgtatgtgctgatgttcgcaacttctctgtacacagggtattcttacggtgttgcgcctatgattagtttctactatggtgaacaaaaccatgagaaactgaaaaaactgatacgaatgagtttgaaaatcatcggcgccattgccgctgttactttggtggtttcccttgcagttacgcagccgcttgtatcggtatttgcccgcccggataatccggtttatggattggcagttacaggaaatcgcatttgctcctttgccctcattgttataggttttaatgtatttgcaagtggaatgtttacggcattgtccaacggacttatttctgctgtccttgccttttcccgttcctttgtattcatggtcattgctatgctgatacttccggctatatatggggttacaggcgtatggctggcaacacctgttgcagaagttatggctatttgcctctctggcgttatgtttgtaaaatataggaaaaaatatcagtattgaattagcaaaccacgcctttgtgggttctcttcccgtcagattttcaacttatccaatatacatggcgtccccaaaggaaaaaaatctgtaccgttccttcactgcttcctcataagccgccagcacatgctctcttcccgccagcgcggacacgagcatgatgagtgtagactccggaagatggaaattcgtgataaggccgtccagaagcttaaactcataacccggatatatgaagatatccgtccagccgctttttgccgtgatatgccctgtcttatctgctgccgattcgatcgtcctgcagctcgtagttcccacacagatgacctttccgccggtatcttttgccttgtttatcttcatggcggcggcctcatctatctggaaaaactccgagtgcatgtgatgttcgagaatatcatccgccttaacgggccggaaagtgcccagccccacatgcagcgtgaccctcgcaatgtccacaccctttttttgaatctcctccagaagctccggggtaaagtgaagacccgccgtaggcgccgcggcagagccgctgtgtttggcgtagacagtctgataccggttcttgtcttccagctggtgggtgatataggggggaagcggcatctgtccgaggcggtccagtatttcttcaaagatgccttcataggaaaactgtatgagacggttcccttcttccaccacatcaatgacttcacctgtcagtatcccttccccgaaactgatcttcgtaccgatctttgcttttttccccggttttacgagtgtttcccatatatcattttctttccgcttcagcagcaatacctctatctttgcatcggtcccgatcctggaacctacgagcctcgccggaattactttcgtatcattgatgacgaggcagtctcccctgtgaagataatccgtgatatctttaaatacatgatgagagaccaaaccagactccttgtctaatacaaggagtctggaactggaacggtcctcaagcggatcctgcgcgatcaattcttccggcaattcataataaaaatcctgacgtttcataatgaatcccttctaaaacttattgttatttactgtttgtcttctcccaggccggcctgcggatcctgctccggctccaccatgtggtaaccggtctgcactggttccttttggtacggcgaccgctgctgtgataacggcggcagctgtttggactcatgcggcggcgcctgtcccggcccacacggcggtttctgctcctgcacagaaggccccggtcccggcgcgggcattccctgtctctgatatcctccgggccccatcggggctgccggcggggcaggtctttgatagaccggatatactttcaccctgcggccgtaaatcaccctcgtatcacagagtatgtcatgcagcgcccgtttctgcggatcaattccggcgatgatatagccgatatggagaataatggcgcttaagaatcttccgatcgtctccctgtacacgacattaaaaaatgtcagctccttctctccctcagccaccacacgcagattcatggcacgtttgccaagcgttgtgcctgtataataagtacataagataaagtacaatacctgcgcaatgtagagcgcaatatcttttaacgtatactgaaacagaatatctccgctcagaacagtgccttctgtcaaagacatgactccgctcatgatgagccgtacaatgagaaggccgaaaaagacgagaacgctgtcgatcacataggctgctgcccttacccagaatcctgcgtaagtcacctgaccattattgtagctgttctgcataatacatcagccccccattttccttttcactggccgtctccgtcagtacctgcgcctcagactttggtacgagttctttcacactgccaaagagggatgcaagcgctgatgtctttgacttcagttcatagaacacatttgttccgagttcacttcccatatctgctttcatatcctcatagagcgatatattgtctataagtccgttctcttttgcctgctttgcggtgtacgtcctgccgtccgcaagtttcttcacttcatcggaagacatgtctctcccgtctgccacgatatccacaaaccggccaaaagattcgtccacctgtgtctggtagatggctatctgatcttcgtcgagcttgctggaatctttgtttttcccgctcgttatgctcacatacctgatcccaagcttttcatagagtccgctcatatcatagcctgccataatgacgccgatggagcctgtcacggtgttcggatttgcgtatatattgtccgcagccatggacacatagtatccgccggatgccgcataatgggccatgtatccccatatgggacggccggtcgcatctttgtattcgttcagcttctggtacagctcttcgctctcatatacggttccgcccggggaatccacatagagaaggatccctgtattgtcggagtcactcataagaaaatcaatgtattccatcgtcgtcgtgtgctgatatccttccgcagtctcaaacagagacgaggctgtctgttcctggatcgtcccctccactttcacgaccgctatatagtcgctgttcggagcgtttaattcataccctccggtcagaatctctcctgccacatccgcaagccggttctgtgccgttacgtttgtcaaaacactgataactcctgttgcgataaacaggacgacggccaggataaggccgcccatctgctttttattcatcttccgtcctcctgcgcttatttgcgaagttcaattcccattccttccagtgccttcaaaatacggttcatggcttcgcttacttccgcgtcttccagcgtcttgtcttttgcgcggaacacgatggaatatgccactgacttatacccctgcttgatctgagccccctcataaaggtcaaacagcgcatagctttccagatatgacccgcccttattttcgatgacttcctcgatctgtccggccaggatctcctttggcatgaccatactgatgtcgcgcgtcacggccgggaaccttgcaattcccgtatacttgcggtcaaacgtcgcacgctctacgatctctggcatatcgatcactgcgatataggctttctccccgataccgtacgtatcagccacatccggatgtacttccccgatatagccgacccgtgtgccgtcatagaagatgtctgcctgacgccctggatgaagatacggtctgccggcatccggacgatatgtttccttcttgtgaagcccggctttttcaaagaattcctccaccacgcctttcatgctgaagaaatctccgtccccgtacataccgagtgtgaactgcatgcgttcctccggaagttctgtcggtggaagcgatttcggcagatagatattgcccagttcatacagcctgacatttttatttctccggttatagtttgtcgccagtgaagtgagcatgccgttcaatggcgttgtccgcataatactgtaatcttccccgagcggattcatgatctccaccgtatttctaagaggagaatccgcaggaatcatcagcttgtcaaataccttcggactttcaaatgagtagttcattccctggctgaatccgcagaattccgcgacatctcttgccacttcctccacgcgcagtttaaaagacagctttccggtcgtcgcctcgccgtgcggaagcgtcgtcgggatattgtcatagccgtagaatctggctacttcctctgcaaggtcagccatgcggaagatgtcatgacggaaggtcggcgcgatgatctccccggatgtctcgtcatatataaggtctactctcttcagataacggatcatatcttccctggaaatgtctgtgccgagcagggcgttgatctcatctgcatcaaatggaacacgtaccggctcttttttcttcccgtatacgtccacgatgcctccgactacctctccggctcccagttcttccacaagctggcaggcgcggtctatcgctgcctgtgcattgttcggatcaagtcctttttcaaacttgccggacgcatcggtgcgcagtccgactttcttgcttgatttccgtatatttgtaccgtcaaagcaggcggcctcaaaaagcatcgtcttaacgtcatctgtgatcatggaattctcgccgcccatgatgcccgcaataccgatagatttctgtccgtcgcatatcatgagtaccgactcatccatctggcgttcctggccgtccagagttgtgaacttttcatctgctccggctgtgcggacgatgatctccctgtcctcgatcgtgtccaggtcgtatgcgtgcatcggctgtccgtactcttccattacatagttagttatatcgaccagattgttgatcgggcggattcctacggaggcaagtcttctctgcatccatttcggagaaggccctatctttatattcttgactacccttgcgcagtatctcggacagaggtctgtgttctttacggtcactttgatatagtcatttacatcttcttcattccccgtctctttcacctcaggcggtacaaactctttgccgaatgtagctgccgcctccctggcgatgcctatgacactgtagcagtctactctgttggacgtcacttcgtactcaaagacaacatcgtgaaggccgagcaattccacggcatctgctcccggctttgcctcttcggaaaagatatagatgccttcctccggcgcctccgggtacatgtcccggttggaacccagttcctcgatggagcacatcataccgtcgctctccaccccgcgcagctttcctttcttgatcttaattccgcctgctacgcgggttcccggctcatgtccgcctgccacgcgcccgcctgcgagcactacaggaaccttgtcgccttcctgcacattgctggcgcccgtgacgatctgtacggagccatccccgatattcacctgacagataataagcttatccgcgtcaggatgcttttctatcttgtcgatctgcccgacgatgattttatccagatccgcatccagttcttcgtatccttccaccttcgtcccggacaatgtcatcgcatcggtatattcctgcgcatctgcctcaagccccggcacatacgctttgatccatgataatgatgtattcattcctatctcctttcagcattaaaactgctttaaaaatcttatatcattttcgtacagcaatctcatgtcgtctatctcatatttcagcagagcgatccgctccagccctactccaaaggcaaatccgctgtaagtttccggatcgatgccgcacatttcaagcacatgcggatgtaccataccgcagccgaggatctcgatccagccggagcctttgcagaagcggcatccctttcctccgcacttaaagcatgacacatccacttccgcgcttggctctgtgaatgggaaatgatgcggacggaatttcgttttcgtctctgctccgaacagttcttttgcaaatacctccaatgttccctttaaatctgcaaaggaaatatttttgtcaatgacaagcccttcgatctggtggaaagaaggagaatgtgtcgcatccacttcatcggaacggaaaacacgtcccggcgcgatcatccgtatcggaagctttccctgctccatgacacgcgcctggacaggcgacgtctgcgtccgcagcacaatgtctttatttatatagaacgtatcctgctcatcctttgccggatggtcggcaggaatgttcagtttttcaaagttgtacaggtcgtattccacttccggtccttctactacttcatatcccatgcctacgaagattctctccacctcttccagcgcgatcgtattcggatgacggtgtccggccatattctttctcgacggcagtgtaacgtcgatcacttcctgcttcatcttctcttcccggatggctctctccatcttcttccgggtgtcttccatcacttcttcgatggctgctcttgtctcattcacaagctgccccaccttcggcctctcttccggggcaacatccttcatccccttcagcacagcggttagctcccctttctttccaaggaatcttacacgcacatcattcagcttctccggcatatcggctgcttcgatcgctctcagcgcttcttctttgatgctttgcaatttctctttcatctcttctctcctttattaaacagattataggacgaaacttcctatacaacaaaaaaaccccgtccccaaagggacgaggtcacaactcgcggtaccaccctgattcccgcccatacaggcggacactcaaatgcgtaacgtgcatgcacggcatctcctactagacttatacggaaattcaaagatgcagctcgcgcgggaaattcgatcgccatctgaaccaaaggaaactttcagcccggtggtttcctctctcttgtggaagatgggtctctactgacacggtcatagcttttgtcaatttatattaatatattctaacacaacaaatacgtatgtcaaggataaaactttaagatcttgctttctttccggacgaaccggtcaatatcttgtcatacatgagtatgttaatctccccgccgagcagtatactgtacatgcagaaatacatccagagcatgataagcacgatcgtcgtcaagctgccgtacatatccgaaaaacctttaaaaatatcgacgtacacggagaatatccatgatacgatcatccacccgatggccgcaaaaacagcgcccggtatctgcttcttcaatgaatctttccggttcggaagaaacttgtatatcagaagcgagaataccacgagcacgaccggcatgatatacacacgcgttctgatcagccagtctgcaagtccggacaggatcggtatgtgctctgcgataaagatattaagtgtgttgccaaacacggacagcacaagcagaaaaatgatcacaaggataaacattacggtatacaaggtcgcgcgtatgcggagaactaaataatttctcgtctcacggcagttgtatacacagttcagtccccctgtcatggccagtacacccttccccgcggaccagagggccacaatgaccgtaacgggaatgatccctgacgactgattatacacctggtttactatggatgtgatgagagaatccacagaagacggaaatacccgtatgactgcggtcatcacgtccgccttcgtcaccggcgtatactgtaccattgttatcaaaagaagaatgatggggataaggcacaacataaaaaagaaggcagactgcgccgcatatgcccccacgtgatcgtccgtgacttcctgtgatatctctttcccttttttgtataattttctgtaacttttcattgctcactcctactgcgttctccttattttacccgatttttccatctttgtctattgaaaaacaaaaggtgatacgttactatatgatgtatacacaaaatacggtaaggaaggtagaaacatgcagcttttaaaagaacgaatcgtgaaagacggaacggtaaagccgggaaatgtactaaaggtggacagttttctcaatcaccagatggatatcgacttgatcaacgagataggaaaggaattccgcaggagatttccaagtgacaagatcacaaagattctgaccatcgaggcatccggtatcggaattgcctgcattgcagcacagtatttccacgtaccagtagtatttgccaaaaaagcgcaaagtattaatattgacggggaagtctaccatacaaaggtggaatctttcacgcacaaaaaagtatacgatgtcatcctctcgaaaaaattcctggatgcagatgaccatgtccttgtcatcgatgattttctcgcaaacggctgtgcgctcatgggtcttcttgacatcatcaaagaggccggcgcgaccatcgaaggagccggcatcgttgtggagaaaggattccagcagggcggccagatcatccgccagaatggtattcatctggaatcccttgcaattattgagacaatgaccgatacatcactcaccttccgggaatagccggcgcggcgacgctgtccattcttcaaattccacgacagtaagcggctttgaatagtagtaaccctgcacgagctcacagtcagcttccttaagaaaatcaatctgctcctgcgtctctattccttccgctacaacatggatccccatatctttggcaagccggatgaatccggtgatgatgctgcgggctttgctgtttgtgatatccatgaaaaactccctgtccagctttatcgtgtcgatatcaaaatccttaagcagcgccagagaggaaaatccgacgccaaaatcatcgagcgaacataagaaaccttgttcatgcatcttcactattgtctcctttacgagctctctctgctgttcgtcgaataatatagactctgtcagctcgatctcgattattccgtccggtattctgtatttctctttcagcgccacaaactcactgagaaaattaagatttttaaagtgtactctcgaaagatttacagataccggcagaagctctctgttatcctgcatgcatctgtacagaaaaatgcacatttcctcaaaaacgtacaggtcaagtctgcatatattgtcactcttttcaaacagagggataaattccgaaggcagtatccttcccttctgcgggtggaaccatctcacgagcacctctgccccgccgggcctgccgtcggaaagcctcaccttaggctgcatgtatatttgaaaatcatgattttcgacagaaccgtcaaacagagcattcagctcatgctcttcccttatcttctgcgtcatagccggagtgtaaaaacagcacgcgctgtttccatcatactgtctgcaagcgattcttgccctgtcctgaataaccgcaatatttaagtccggctcatcaacaacgcagactccccactgcgccgacagatgatattctatagcagcatgttcattgaaggcattcatcgcctccgtcatccgggtcactctcgactgaatgacatcctccctgttctcccgcatacagataaagaaatgatcggctccggccctggcagctgtctctccttcacggatattttccatgatctttttataaatatgtatcagaatgtcattccctgttttcattccgaaattctcattcatcatcttgaagttttttatatttaaaaatatgaccgcatgcgtacatgccggcgctttctctgcctgtgatctatatttcatccggaaggcggcctcattcattccaccggtaagcggatctgtgaaagcagctctttccatttctcttctgcccactctgtagaagcgcagcaccatggcaagaaacagaccgcacgccagtatgatgcccgccagacagaaaaatgtgtgaaatacatatgtatctgtctcctgcgaaagcagatcagccggaacaagggtgagcagcatccagccgttgactcccagaggacagtacgacataataagcctgctcttgtcaaccgctgtaaaggaatatacccccgaacgtcctgctgcccagtcatctctcatctttgtgatgtcactgcggtcttctgtatcagaccgaaagatatcatccagctgcagaaacggctttagatctgtcggtgagatcacaacggtcccttcactgtccacaatacaattcagccctttgccggcaaaactctccgactgaatgagcgcctgcatattctcctttctgcgcactccaacaaaaactccgttgaccgtaccgtctctgcacagcggaacagaaaaaagcagattctgtccttccacacagtccaccgaaggcccctttccaaaagaatcctgaatcgccggcatagtctttaagtcttctgccgcaccgtctccgtagatcgctgtaccgtcactgaagatcacagcataagaatcaaattctgttttctctgtctccttcattaaagtatcagccagctcctggctgtcctggtactcagaagcgtgatctgccagaagagacgctgccgtcaaagatgacgcaagctgcgacgatataccgcctgtcagctgatcggagacatcggaggcataaccttccatacttcgttcgagcgtcttctttaagtccaaagtcttaaagaccatgaccgcgataataaatatcacgataactgacaaggcgatccagcgccttttccacatgacagcaccacttctatcaaataataaatgatttgtactacgcatactgtccactccttaactctaaaaaaatgatatcactgatcagacagcacgacaataattaatctgtgtacgtatgcatatagttccttgccattttttatatccttttgtataattatctaaatccggcgcagggaggtaagcgtgatgaatgtgaagaagactttagcagaacatgtctacggggaactgaaggagcagatcgtgagcggacgtttgaaatatggagacagactcccgtccatgaacagtctgtgcgttttttacaatgtagggatacgcacggtaaaagatgtcatgcgcagactgaaggaagaaggttatatacgcacagaagaacgaaaagccgctgccgttatttataaggccgctccagaagattccgggatccattccgtactgcagcgaaaaacttccattctcgctgtacatgaaacgatctatatactgattcctctgctgttgtcgttttccgccagtctctttgatgaagaagaattgaggcagatgacgcgccgcatcacgacattgaggcggagacatccaaaagcttcggaacaggcctgccggaactgcatctacactatgctggaacgctcacacaatctgctgttccgagatctgttctccagcctggagacgtacgccaggctgcccttcttccaggatcacggccgctttctggaacttgtacaggaatataatgaatttgacagtaccgcctgggtgatgggctctataccttccagagatgcccatgaaataacccgccgcttccggcttatgttcaaggctgtatcctcggccatccgccgttatctcgatgagatgcacatccgatacggtgatgttttggaggagacatctgttgaatacgcgtgggcagcagaacgaggacgggaccattactatacacagatagtccgggacttaattaataagataggtaccggattttataaagaaggtgcttttctgccgtctgaggcagccctggcccgtcagtacaaggtgagtgtctccactgtgcgcagagcactgtccatgctcggtgaactcggcttctcgaagacattaaacggcaagggtaccgtcgtatttctccagagtgacagctcaacctttcaatgtatgaaaaacaaaacatacagaagagataccatgttatatctgagcggtgtacagcttatggccattgctgtccatccggcagcccttctcgcatttgaccacatcgacagacagacgatacaaaagctccggcagcgtacttcccggaccggctccataccactagcggacctcacacgctgcgtcatagacaaccagacgctcaagccgatgaagaccattctgcaggagctggagaaactcatgaactggggctattacttctccttcttcagcgaaggaccttcacatgccgatctgcttacgaaatacagtctgacagcgctggagcatctggccggcggcaggaaagacgcgtttgcctcctcgctgtccgaatgttactgccatatcctctcttttgtccgggatttcatgtcacgatgcgggctgcccgaagccgccggcctccttacccccggcattgtcagcatatgacggcgcttaactgataaagggtgcgtttcctgctctgaacaggaaacgcacccttgttgtctctgtttattctatcgtgacatcatggaaaaagagtgtgaggatctctttgtagtctttcccctgttttgccatctcgtttgcgccgttctggctcattccgatgccgtggccgtatcctccgccctttatgacaaatgcgtctgacgtcttttcgatcgtaaagaaggcgctcggcagcagcgcgctgctgtctatgaccgtgccgtcctgcttcgttatctggtagccctttcctcccagcgcccttctgatcttattttccgtctctactgtcacacttccgctgctgcctgtcgcttttatctgcaacgccacatcacccggccctttttttgtcacctccacactggacaatgtccccacgtccgtgccggtattgagcccgacgagagcggacagtgtctggatgggaactgacgcctcccatctgtaccacggaagccctttttcgtaatccgcttttccgtccgacacatttacactctgcaggtatccgttgctgtcgttcggcgctgtaccccaggcttccatggatgtcgtcttaccgcaggaggtggaataataatatgtagtaacgacctctccctgatatcggacgacctggccggcggtctcagccacggcctttgatgtggattcctgttccttggaattgccgtacacctggtagtctgtactgtcatttacatgcgcttcatactccggatatccgtagtctgccatctggcggtaggcataacttctggcgcagaccgcctgcaccttcagcgcctccagttcatacgaagccggcatctcactcggcaccacgccgcacaggtacgtctccacaggcagttcatttatgatgacaataccctcagcggtagtgcgcagttcgatcacaccgctgtaggatggagtgccgtaacctcttttgatgcttgacagcgtgacctttccctcctttgcctgtatacgtatagttcctttctgaaatctggcgtcatccggcgctatcgtaagactgtccggcttatcccagtcttccttttcctctccgcacgtaagtgtcatccctttgtcagacgacaccgtcacagccggatggacaatattgctgtatccgttatccataataaggacgcgtatattcggattatctatggccgttttttcttcgcttcggccgccttttgattcctctgactttttttcctttccgggcgtgcctgtgccttttcttatgtctgttccctttaacgccgacacgagcccgactataataaacaaggtgacgagaatcgccagcccgtaatacagatatttttcttttcttctatgtctcacattatgtacctcttgtccacctgttttttctatatttatgacagcatccgtaaaatagaccggaatgcagaaaaaaatgaattcccccatatcacaaaaagacagccgtattatctacgactgccctttatcttttgtgagttccccaaaatgccggttcctgtattttgactcctagccgcagccaggtgggtgtccgcatctgtttttctgtcttcccctgcgtaatcgggggcctgacatatttcagagatataagagtcccgtttaaagttttgtaggttcaaaattacaggagttgtcgtgcatcccaggttttcctaaaatcattatactctattatctctcgtttttcaacaaaaatgtgccggctgtgacagctggcacatttttacaattttatgaggcttgattaagccagttcttctaccagtttattgagtgctgcaagcgcctcgtccggcagtttatcataaccgtcttttgctgttgagaacttctctactgcatttacacggttgagcatagcgttcttaagctgggctttgtagtctgcgtcattcaggtcaggaacaaatccttcccactccatgatctcgatatcttcaaatggtccccactgtttaaagtctgctcttctctctacgatagcttcgagaattccaagcgtatcctttggctgaaccttcttgcccatgaaatcgcctgtattgacgatatagcagtctacgtctttttcttccacgagctttttgaacttctcatagtcattaacaagaggataggttctgaacgggttagcgtatggcacgatacgcagtgcgttcaagtctgtgcctgcagcaacacgctctgccgtggatgtctttgtcgcaagtgtcgcacccatcacagatgcaagggcggagccttttaattttactaccggcggaatggtaggatccttcatgatccagaaaatggcattgacaggtgcgtctatcttgtccacgcggtttggtgaccacagcttggacttgatggcgcgtccgttaccgtttctgatatcctctgtcacaagctgaatctttccgtcctcatctaatgtcgcagaacagttctgcgcggataataagtatttgttatcttcgcagcctgtaggataatccgctgtcttgtcaaagtatgtcggctctaacgctacggaagcacaggtatctgtgttgatgatgaacgcatcgtcgtgcagcactgtgataggatacttaccgtcgtgctttgcatgtgtaagagtagatttaccggaacctgaaagtccaaatacggaagcaacatatttggaaccgtcagaaagtgtgtattccttctgtccgccatggcaggaagcgtatccgtttctgttggcgatcgcccatgccattgtaagcgtacctttcttgtgttctccgaagtatctcatgccgaggatacaagcacagttttcggctgtgtcgaaatagcagagagtgagaggatcactcagacagctgtagtcaacgtcaggacggtcctgcgggaaccactgaggatcggagaaaatatagatatcaggctcttttccgttcccaactgctttggaatttttgtacatctttacatattcatcagacatatactggaagttcagcatccagttgtacatgatgttctcttctccctctggaataagaaggtgtgcctttaccatgaactccgtatcaagacctacatatacggtcgcgtgatacatcgtcttccagcgtgattcgtaaacagcatccatcgtcaccttgtcaagctttgcagcatccactcccggttctcccttaatgcggcgcgcgcctgcgtaacgtcctgtcactgcaccgtcgttgaacaacagtacccttgcatcgctgtcaagaccaaattcttctcccctatatacgggcatatctgtaacgattgttcccggtgaattcttcgccaggttgtatgcctcttttaatgtgttaaccggaacaacattatttccataaaatgctgcttcaattatagagcgtgttttggaaaaaccagtttttccggcaccaatttcactgatcggataatatgcttttgttgccatgtctcttttcctccttaaaattccaaatttgattcattatctcatttttcagaagaaaagtcaagactttaacaatgttttaacgaaggttttttgtttttatcattcatttatctctgaattgttgtatgtattgtgtatataatttcaaaaaatgcaggattacaaatataatcctgcatttttcaccctttaaacaccaaaatattttttattgcacttgcggaccgccacaaaaaaccagataagcgcaacccatacaagagcgaacattatcaaaaataatatgccgataccgcccatataagaattgtacaggtcgagcgccccatatgccgttacgataatgcccagcgtcagaagcggagcggacatctccctgcagtaggcgtccacgtccttgcattttttgaatcttgcatccttcggcagcaggatcgtcgtattgatctccttttttgtcttcatcatgaagaaggcatacagacagtacaatccgcatccaagcccaaatattccaaatattccatctaacatctgtcacacctctactattgtatatttaatatctcttttacagtaacttccatcttatccgcatcacactccgttcggtggagcacgtccgcatccaggatatccgcgatggcgcggggcatctccactccggaaacctttttaagctcctccagaaggcggaattcatcttcctccccatatttgctgtcaatggaggtcataacgctttttacgaacttgaacgggctggccgtcgagacgatgagacatttgccgctgtccccggaggtcttcctgtattcatcacacacgtatgatgccacagccgtatgcgtatccagtacatacccggttccgtcccagatatgtctgatctgcctggacgtctgctcctgcgttgcgtatccggctttgaagtctttcagcttctccttcatctcctctgtcagcgtataacttcccccgcttttcagctcgctcatgaatgcggccgtctgttcggaatcttctcctgtaacaaggtagataaggcgctccagattgctggagatcaaaatatccatggacggggaggtggtgagcacaaagtctctgtttctgtcatatgttcccgtccggaaaaagtcaaacagcaccttattttcattggaagcacacacaagatggtcgatcggcactcccatctgcctggcgtaatatgcggccagtatatttccgaaattgcctgtcgggacgactacgttgatcttctctccttcagacagctcctcaccctcaagcagctttgcatacgcgtaaacataatagacgacctgggggatcagacggccgatattgatcgaattggcggaggaaaactgatatccgttttcggcaagctttccggcaagctcttcgttctcaaacatttctttgacaccgctttgggcattgtcaaagttaccgtgtattgcgactacatctacattcttccccttctgcgtgaccatctgcagctcctgcaccctgctcacgccgttcttcgggtaaaacacaatgatcctcgtaccttccacatccgcgaatcctgccatggccgcttttccggtatctccggaagtcgccgccagtatgacgatctcattctccacattgtttttcttcgcagcggtcgtcatgagatacggaaggatagacagagccatatccttaaaggctatcgttgagccgtggaacagttccaggtaatatgtatcatcaacctttgtaagcggggcgatctcctctgtgtcaaacttgctgtcatacgccctgccgatgcagtctttcagctcttcctccgtaaaatcagtcagaaacagcttcatcacctcataggcagtctcctgatagctcatatccttcagcttatccatcggaatgtcaagcgccgggatccgctccggcacaaacagtccgccgtccggcgcaagccctttcagcactgcctcagacgcggccgccttcaagttggaatttcttgtgctcttataatgtagattcatctttctcatcctttcactttgctttcctgaatgcaataaaaagaattgcactgattgccatcaatatcggataaaacaaatatggcattatgttaaatggtgtcagtcccgtaaggctggccgcggagagcagctgtgccccgtaagggatcagtccctgccccacggatgtgaatatatcgagcagagacgcggaacgtctcggtgatatatcaaattcttcactgatatcttttgcgataggacctgccataacgatggcgaccgtattgttggccgtgcacatgtcgacaagcagagaaagccccgcgattcccgcctcgcctccgcgctgcccctttatactgcgcctgatcaggttcaggatgaactggatgccgccgtactctttcacaagtgacacgatacaggccaccacgatggatatgaccgtgatatcgtacatgcctgtcacgcctttcccgacagcggagaacatctctcctgcggcaaggcttccggtgccgacaccgacaacaagggatacgaccgttcccccaatgagcacgacaaacacgttcatgccgatgagcgcccccacaagcacgaggatatacggaatgacacggaggatattataacctcccacagccacactggcgcttccgttccttgtgatcaccagaaagataatgatcgtgataacggcggccggcagtacaatgagaaagttctccctgaacttgtccttcatctcgcatccctgcgtctttaccgcagcgatcgtcgtatccgatatcatggacagattgtccccgaacatggctccgcacacaactgctccgatacagatcgccagggagaatcctgtctcctcgctgatacctgcggcgatcggcgcaagcgcggcgatcgttcccatggaagtccccatggatacagagataaaacatccgatcacgaacagtcctaccactgcaatcttggcgggcagaatggacaggccgaaactgaccgtactctccactcccccggcggccgtcacagcgccggaaaatcctccggcgcacaggaagataaggctcatggtaatgatattctcatcccccacccctttggctataacacttatcttctcctgaaagctcaggcctctgttctgtataaatgctgcgaacagcgctatcaaaaatgccacaatggcaggcatcgcgtaaaaatcccctgtcacgatgccggatccaaggaatatcacgagaaatattcctatcggcagcagcgccgccccatttcctctctcatttcccataccagactatcctcactatctctttttaccgttcgtataattcacaagccccccggccgcgataagcttctgcataaattccgggaacggctgtccctgaaagcttttgtccttcgtcttgttgtagatcattccgctgtcaaaatcaacctccacttcatctccggcctcaattccctgcgcagcctccggacattcgatgataggcagcccgatattgatcgcatttctatagaagatacgggcaaatgtctccgcgatcacgcagctgacgccggcctctttcagacagagcggcgcatgttctcttgacgagccgcagccgaaattctttctggccacgatcatgtcacctggcttaactttacccgcgaattccggatcgatatctaccatggcatgggacgccagctctttcccgtcaaaggagttcagataccgtgccgggatgatcacatctgtgtctacattgtccccatatttaaatacatgtcctgacgctctcattatctgtcacctgctttctctggatttgcaatatgacccgcgatggcgcttgccgccgccacttccggggatgcaaggtaaataagggaatctacatgtcccattctgccaacaaagttccggtttgtggtggaaacgcatttttcccctgccgcgagcacacccatgtgcccgcccatgcacggaccgcagctcggtgtattgaacgcgcagccggcgtcgataaagatatccaccagcccttcgctgatacactgcttatagatcttctgcgtggcaggaattatcatggcgcgtacatccggatgcactttatgtcccttcagcacagccgccgctcttctcatgtcttccatacggccgttcgtacaggaaccgataacgacctggtcgatcctgaccggctccatagcctcgatctcatcgatcgtctttgcgttgcccggaagatgagggaacgccaccgtaggacgtactttggagagatcgatctccaccacctcgtcgtagacggcgtcctcatccgcctcatatatcgtgtagctcttgtcagagtgttccttcatatatgtctcagcctgttcgtccacgataaagatcccgtttttcgccccggcttcgatcgccatgttcgccatggtaaaacggtcgtccatcgaaaggttcgagatgccttcgcccgtgaattccatggacttataaagcgcgccgtccacgccgatctttccgataatatgtatgatgatatctttgccgctcacatactgtgacggcttattgctcagcacgaactttatggcggaaggaactttaaaccacaactctccggtcgccattccggtcgctatgtctgtcgtacccacaccggtggaaaatgcgccgagcgccccgtatgtacaagtgtgcgagtccgcgccgatgatgcattcccccgctacagtgatacctttctccggcagcagcgcgtgttcgatccccatctgccccacctcataataatgtgtcagcccctgggctctggcaaattcgcggatggatttggaattttccgcggatttgatatctttgttcggggtaaaatggtccggaacaaggaccaccttttccctgtcgaatactttatccgccatctggttaaatacaggcaccgccatggggcctgtgatatcattggccataactacgtcaagctttgcctcgatcagctgtcccgcctccacatggtcaagttccgcatgtgccgcaagaatcctctgtgtcatcgtcattcccatatcttgtgacgcctccttcatctacttagtcttacgagctattttaccacaggctgtgattgcggcgcaagaaagaatgagcaatatgataagaaccatcaaactttcttcatctcccgtcttcacggcctctgcttttaccgtaactttcggcgcaggcttctcttctggctgctccggctcctttttcacctcttccggtatttcttttggctcctcctgcggctgctctggttcttcaggctcttccactgtgacagtctctctgtctttcacttcatcggcattgtccgccctcacaacgacttcattttcaatctccctgccgataacagacgcatcggtgatgacgacctggtattcaacatagaacttctctcctttttctacgctctgtaagaattccagcgactggccggagcggatcgtatatgtgtttccttccgccgagatgacggcatccgggaccgtgcgctgtccggcatccagcaggacgacagaattcttctgaagcttcactccttccgtcaggatcgtatctgaaatgacgacatttttggcgactgcgtcctgtatgcgctgtgtgacctcgatcgtatatgtgataacatcccccagtttatatgtctttccggttttatccgcctgtttctttgtctcaagctccggcttcggaagccatgataccgccagagaggcgggcgcagttcccactgtgacgagcctgcctgcaccgatattctgtccgctttcccccggctttatgacaagcgtccgccatgcctgccggcggctgccgtacagctctcccgattcataccgctccccgttaaacagcccggcatccgccgacagataaaaacggtcgccgcctgacacagccacatttccggacgttcttgtcccttttgtgacattgacaagccacaccccctccggaagcggcacggtcatactgttgtccgcgtcgccgacacaggttatctcatctgtccgctgctgctttccttctctgtcaaaccagctctgaaactctgtgccggagaatgcgatatccggcttcgggatcgccggccattctctgatccatgaggcacaccggacaacctgatccttcatctcttcgttcaggccgataaatgcgtcgctgtctccgctcataccgtcataaatataggaaagtacacagtgggacaggcagtaggcattttcctttgtctgccacacctgcgcaagcgcgggcttcatatgtgtctcataccccggccctccgtacacataatacatggccttgctcagaagctggctgttatcgatgacctgtgagtcataactgccgtcggacggcggtaccttgccaggttccaggcagtatccgagaacgccgtctatataataatagtgagtcgagtatccctgataataaactgcctccccctgttcaagagtcacggacgccgcccgcgcctctcccttcaggataagacaaaaaagcagcaaaaataaaccggacgcaaacagcctccattgtctggctacatatttcatacgcattctccttttctttatctcttgaggaaaatcagggatgaaagctcccgaaacggggatgccccctttaaagaccagcagaactgccggcgatagaattacttgacgagtgtaaatatcatatctgctaattctgtttttgtcaatatatatttgacgattgacactctgtttagtagaataggagaagtatcctccgtctgctggcatggcgggggacagcatgttattttataaggagtgtagagaatgaacacaagagaaaaattttcatcacggctcggttttctgcttatcagcgcaggctgcgcagtaggactcggcaacgtatggcggttcccatatatcaccggacagtacgggggcgctgcttttgttctgatataccttgtattcctggtccttctcggtcttccgatcatgactatggaatattccgtgggacgggcgtcacagaaatccgccgccagatcttttgaagaactggaacctgagggaacaaaatggcattttatcaagctcgtccctctcgtcggcaactatatgctgatgatgttctacacaacggtcggcggctggatgcttgcctatttcttcaagaccgcggccggctcgctgagcggcaaaaatgcacagcagatcaatgcttccttttccggctttctggcaagtccttcgcagcaggttctctggatgcttgttgtcaccgtcatcggatttttcatctgttccagagggctcagaaatggagtggagaagatttcaaaatacatgatgggcgcgctgtttctcgtcatgatcgtactcgttgtgcacagcttcctgctcagcggcgcaaaggaagggcttgccttctacctgattcctgatttcggcagagcgctggagcattattccctcggcgagatcatcttcgccgcgctcgggcaggcgtttttcacgctgagtctcggtatcggggcgctggctatctttggcagttatatcggaaaagaccactctctcgtatcggagagtcttaacgtggtcgttctggatacgctcgtcgcgctgttctcgggacttatcatctttcccgcatgttttacgtataacatagacgcgggcagcggaccgggacttatatttgtcacacttccggccaccttcaatgagatggccggaggaagggtctggggctctctgttcttcgcctttatggcctttgctgccctgactacgatcatcgcggtatttgaaaatatcgtggcatttgccatggacttcggctggacccgaaagaaggcagttgccgtaaatgcggtcgtcgttatcctgctctcccttccatgcgcgctcggtttcaatcttttgagcggtttccagccattcggcgcgggaagcactgttcaggatctggaggactttatcgtctccaacacactgctgccgctcggctcactgctctatctgctcttctgtacataccggtacggatggggctggaagaactacagtcaggaagtaaacagcggaaagggactgaagcttccgaattggacaaagggctacatctcttatgtcctgccgcttatcgttatcttcatcctcgtggacggttatctggaaaagctcggctttccggccaattaccttctcccggtattctgtcttatatatccgggttacctgatggtacagtcctatatggtacaccgtaaaaagaagaaactataaagcaaacgcagcctctgccgcactgccggatatgtccggcagcacaggcatggctgcgtttttcattatttccttaatctctgctggagttctttcaatatgtctttatgccgcctcgattccatcttcgggaacgcctttagcagacggttgctcactctcgttccatgttctgccagctccctgtatttttctttcagatccgccacacggcccatctgttcttccgtggccgtctccagcttttctttgatcccttccgtaacttccatcgtctccatcacgttttcgtgaatgttctcccctaccttgtcggaaaactcccgcagttccgccgcgatcttctccatcatctcgagacgtctgttcagcttcaagataccggacgcggtaacataaatatctgaaatgagcaccgcgccgagcacggcgatgatcacaatgccgacaacttccgggatgaacgaaagccccttatgtatgagcggatggactaccttcacgatgaatacgcaggccacgccccagacaagagaaaaaacaagacagacgtatccgcctatgttcagcggctggccggtataatcccaccatttgtgatgaaatatcttatccatcagaaagccggtgatccattcgatcagtgtgacgagaacggtggacgtaagataaagtaatatgaggttgtcctttaccggggcaagaaactgtacgacaataccgacaccgacgccgtagatgggacatatggggccgtttaagaatccccggttcacaaacttatgctgtttcgtcgtggcaaaagccacctctgtacaccatccgagaaaaccgtatgtgaaaaagtatagtatgaaaaaataaacctgcatagatccgctccgtttctgcctctaatttatagtctttatagtatacttcacattgccatttacgtcaaatagtggtatgatatccattgtaatagataataattatcaataacaattgtaggagctgttcacatatgacactgaaacaaggaaaaaacaatcagacttatgaggtgagatcgatcgatatcgagctaagcctggagcgccgcctcgaagcgctcggtctgacggaaggtacgcagatcacggtgctcaacaacgacaaaaaaggctctctgacagccaagttccgcggaacccgctttgccatgggcaggcggatcgccgaccatatagagatccgggaggttgaggcgcaatgagaaaaacgatcaatgtaggctttattgggaatccaaactgcggaaagacgaccctgttcaacgcgtttaccggcgcaaacctgaaggtggccaactggccgggtgtcaccgtagagaagaaggagggacgggccacatacaaagggcaggaatttaagctcatcgaccttcccggtatctacagcctgacgtcatatacaatggaagaaacagtgtcgcgcgaatgtatcatgagcgacgacgtggatgtcattgtggacgtcatagacgcctccagtctggaacggaatctgtacctcacactccagctcatcgagcttggcaaaccggtcgtcctggcgcttaacatgatggatattgtggaagagcgggggatggagatcgacctccacagacttccggaaatgctcggcgtcccggccattccggtatctgccagaaaaaagaccgggctgtccatcctcatgcacgccgtctcacatcacaaagaatatgacaggcagggaccattgatccaccaccatcccggcctcaaatattcacaccggcataaccaccacgacgaatatgccatggtgtacgaggattacatagaggacaagatagaccttatcatagctgagctcagccggtgctatcctgatctggaaaacaagcgctggcatgccatcaagatcctcgagcaggacaaaggtgtcacaaacgcctatccgcttgaactcggcaatacggtggaccgcagctatgaaaaggatatcatcaaccagaaatataattttatagaggagatcattgcggaggtcctcgtgaacaagtcacgcaaagaagcgtctaccgataaaatagaccgtattcttacgagccggtggctcgggcttccgatttttctcggaattatggcccttgtctttttcttcacttttacgatcggggactggctgaaaggatactttgagatcgggctggaggcgctgtccgcggctgtttcatccggccttgccgctgtaaatacaggggagatgatgacctcccttgtggtggacggcattatctcaggcgtgggcgggatcctgacctttctgcccaatatatttatcctgtttctggcgcttgcctttctggaggacagcggttatatggcccgggtcgcctttgtcatggacgatatcatgagtaaacttggtctgtcaggacgggccttccttccgctgcttctcggtttcggctgttcggttcctgccatcatggcgtcccgcgcgctggagcataagagagaccggttcaagacgatcctcgtcacgccgtttatgtcctgcagcgcaagactgcctatatatgtgctgttttcttccatgttttttggaaagcatgccatgctcgtatgctattccatgtatgtgctcggcatcatcgtagccatcgccaccgcctttatcctgtccaggatagacggaagcagggcagaacacgcgctgctcatagaactgccggaatacaaagcgccgaatgcacgtaccatcgccatctacgtgtgggaaaaaataaaagattatctgaccaaagccggtaccgtcatcttcatcgcctctgtcatcatgtgggtcatactgaactttggtccgggcggatacgtgactgacatcaccgagagcttcggctctatcatcggaagggcggtagtacccgtcttccggcccgccggcctcggacagtggcagatcatcgtggcgctcatcgccggaatcgccgccaaggaagtcgtcgtgtcaagctgcagcgtgctgttcggcatccagaacatcacaaccgcccacggcatgggaacaatggtgacgacactcggttccatgggattcggcgccctgaatgcttatgcactcatggtattctgcctgctgtacgtaccgtgtaccgccaccatcgccacgatgcaccgggaattaaaaagctggaaaggaacccttggaattgtactctttcagcttgtaacagcgtggacaatgagcacaataatctttcaaatcggcaaattgttttagagttgaaaggggtcagaccccctgcatgtgcaggggtctgacccctttcgattcttacgatcattgtaactttttcagtatattcagtttattcttaaatggtgcataacgcacaggtatgtctatgagcagtgactttttcataatgctcttttcgtgtgtaaaggtatcgaagctggctttgccgtggtagccgcccataccgctgttcccgacaccgccgaacggcatgtgggacgtcgccagatgcactaccgtgtcattgatacagcctcctccgtaggagacgttccttaaaatgtaagcttcccttctcttttcttttgtgaacaggtataacgccaggggacggggtctggcattgaccatagctgccgcttctttgatatcgtagaaggtgagcaccggaagcacaggcccgaagatctcttcctgcatcaccggactgtcccagttcacctggtcgacgacagtcggctcgatctgcctcgtgtcgcttctgcttcctccgccgcatacaatgtgtgtcccccgcataagtccgagcactctgtcaaaatgcttgtcattgatcatcttcggatattccggattgtggcacgcgtctttgccgtacattttgtagatgtatttttctatctgcttcagcagtttatctttcacgctcttctggacgagtatataatccggagctacgcacgtctgcccggagttcaagaattttccccacacgatacgctttgccgccagcttaatatccgcggtctcatccacgatgcacggactcttgccgcccagttcaagacttaccggagtgaggtgctttgacgccttctccatcacatatttccccacattaacgcttcccgtgaagaaaatatagtcaaaacgctcattcaggagcgcctcgttttcctttcttccgcccgtgatcacatttacatacttctccggaaacagttcacggatcatcctggccacaatgtctgacgtgtggggggagtaagcggaaggctttactacagcacagttgcccgcacaaatggcgccgacaagaggcgcgaccgtcagctggaacggataattccatggagacatgatcagcactgccccataaggctccggataaataaaggaactggacgggaattgggtgagcggcgtaggcacccgtctcggcttcgcccagcggcgcagatgcttcagcgtgaactttatctcctcttttacgatccctatctctgtggcgtaagcctcaaagggcgatttgtgcagatccttgtgcagtgcttccattatcgcctcttcatttttacatatccaggcgttcatccgctgaagctgcgctatcctgaaccccacgcttttgcactcgccttccctgaaatactctctctgttttctgataatttccttgtaatccgtcattttcctcctcctatgcccgaatctgataataaatttccttcagctgtgcctttttcatgatcttcggtaccgggtagagcggatttgcctctctggccgccctttttgccagcatgtcgatatcgtcttccctgatgccttccagcttctccggcaggcccatccgcctgttcatcgccctgatctccgcgataaatgccttcgccttggcctgatcctcctcgaattcctgcccgatcctgacaatatccgccaattccgcaagctggatataaatactgctcccataggcatccagcacgtacggaagtatgaccgcattggcaagcccgtggggaatgccgtattctccgccgagactgtgggcgatcgcatgaacatatccgacgtatgcacgcgtgaacgccgctccggccaggaaggacgccttctgcatcttttcccttgcctccatatcttccccgtctctgtatgctttctccagattacggaagataagctttaccgctgatacactgtcctcgatcgtctctgccgtgttgctgcgccctatgtacgcctccaccgcatgggtgagggcatccatcccggtggccgctgtgatatgcttcggcagtcctctggtcagcacagggtcgagcaccgcataccgggggatcagaacaaagtcgttgaccgcatatttttcatgtgttttttcatttgtcagcactgccgcaagtgtcgtctcactccccgttccggccgtagtcgggatcgcgatgagcagcggaattggtttcaggatcttcagctctccccgcatggacgatatctttttacgcggccttgccactctggcgccgactcctttggcacagtccatcggggaaccgccgccgaacgcgatgatcgcgtggcagtcgtgttcacggtacagtgcaagcgcctcctccacattggcgatcgtcgggtttgccactgttttgtcatataccgtagagtggatgccggcttcccggatccactctacaagctgcctgtgcagtccaagggcaaaaatacccggatccgtcacaagcaggacatttttgattccttttttctgtattatggcaggcagctttttgagactatccctgccggttatcatctttggctttctccagaaaggcacacggtccatgacaaacttcatcaccttctgaaacagccggcacatcatactatacatcgcttcgttttctcctttgtactttgttccgcatcattatccggacattaaacagatgtatgaacataagagaagtcctctgcatacactgcaaaggacttgtctcattatttcattcgctccagatacgggatctcgatcggatcgatcgggtctaccggattttccacctggcctttttgtcttcttctgtgacgcttgagcagctcgccgcccttattgtagaaccagaaagaatatacaagcagcttgttcaccttcccgatcttgtctttcgttgtcttgttgtacagcattcctcccgcctcaacaggcactttcctgcgtatgagagagataagctccgtctcacacgtcacatgctccggcagcaccgtatatcctctgccgacacagtccagcttgtgggaatcacttcctccgatccccggctttttatatttgcgggccagctttgccgccccttcgttggattcctccggctcacacgaattaaacgcctccacaaaatcaaaccgtttgatgatctccggtgatttataaaacttctttgtatttgtaaaactgagatacttctccccgcaaggatgagccggtccgaggatccccccgtgccggtgcacaaaatcgatcagcacagctacaggcagaccgcgcagttccagcagtctcatctttacaccttccggcataatacagataatgtgccctgcatcacaagtatcgtactctatccccttgagcacgacaaagtcatcatgcaccttgcccttcatgctgtttttccaatggcggtagcctttataggtatcatggtctgtgataagcattccgtcaaaaccattttcctttaactttgtgatatattcatccaagcttactctgctgtccaccgaaccttcttttacgtgacagtgcatatctatcttcatcagtaagccccctttattcatttttatgtttatattatatcacatccgccgcaaaatacaactaaacacagtccatatgggttaatttgccttgccgtccggcgataacgactgcagcagatatttgatgagaatgccgcataacacccagacagccatgtacaagtattctgaaatatggatctccgtaaatccaaacaagacaacggacgccgcctgcatcatgatcccggctgtgagcagcacaatttttaaaattctgtacataataaagcacctcccctgttatagttcacactataacaggggaggtgtgtcataaacaggactcaatcttcctcgtcctctttttcttccgcgtcatcgtcaagtatcattcttgccttctctacctcggtttccctggatacttgttctttatatttttttgcgtgtaccttttccgtcttaccgatctttctggaatgcatcataaactggacgctgataccgataaccgccatgacgatcccgatgccaaagcctatccacgcatttgccgtaagtcctgcaagctcggccgcagccacccccgccgagacaccgccggacagaccggtaacgatgatgacaagcggttcgataaagatgacggcaagcactgcaaacacaaccgcgaccgcgatgctgatgatgagcggaataagtgaatccggcttcagcagcattgcgcatacgccaaacacataagccagcaccatcagaaacactccgaatttatagaggaaaaatgccatcgcgccgagaataacggctccggcgatcaccacagccagaaatgtgatctttgtcagtccaagcccgaccgccacggatactccgatccccgcgccgataacggccccggcggcggcagtcagtattttcacaagcttaagtccgaacagacacacgagtataccgatcgcagccgcaacaataagcgccgtcgtcccctgtacagcgcctgaatctgtgagcttcgacgttccgtccaatgcattgccaattatgtcatttaagtttaccatttccatgatatcgtctcctttgtcccttattaatcatccgtgccggcggaaccggtcatgtgccgcaggcataagtatctatgattccctgaagaagtctcctgtgctccccggcaaccgcctcaggtgaaactattataacatcttttcctaatcctgttaaccacccaaaaaactgttcactcacagcaacctggaccctggccgtaaaaaaaccgtccccgtctctttttactgcggccgattttccgaaccggtcaatgactaccccgatcagacggtttgggaaacggatggataccgtttcttccttccccgcgaacatcccaaaagtttttttcgagtaccgggccggatcaaagtcccggaatatctccgccccttctctgttctccttcaggacctctattttcagcattttatccactctgaaatgcctcagagcgttcttgtccgcatcatagcctatcagataataattttcttccgtccagttgagcgcccacggactgatataatagaatttcccttcattgcgcagtacagccgtcttgtccaatgtccactgtgtatactggaatcttatcttagaattccccgaaatggcggcgtgtatcttgtccacattgtaataaatgctctcattcatcgtcttgatccggtcggaaacatacacctgtctctgcagacaggatgcttcatgcctgcttgccagtgcttcaatttttttgatcaggcttctggacttcttctctgtgataaaacgtgaggactgcaccgcatccacgagcagcttaagctccggcagttcaaagcagtggctcgcaagatagtacccttccggctgttcttttttatactctatatccatgccgtactgtctgagcgtctcaatatcgctgtatatgcttttcctggcggcctggatgccgtttgcttccatggcagtcagaatctctttcattgttatcgaatgttccgtatctgtctgcctctccagcagatccatcagaaacagcagttttattttctggttataagctttcggcatatcgttgtctccatcgcattttgctttgcccggcaagatcggcccggtacagcttttttattacgcatcctattataacaggacacaaaaggacagtaaagatgggcatcaattatattacataaatgacacccatccttactttgattcttcaatcattcttttaccctttctgttggtaaaatttttttctctgatcaacttggatcagattcatagtttaattttttggcggtccgtaccttcctttcttaaactatttctttgaattctgctttcactcttcgataatatttttaataacccgttttgtttgatacatcatacttactgaacttcttacatccaatcaatacttctattcttccgaatctccttatcaaccaacgttattaaaaattatctctgtatgaatgcgtccttcaaattttaataataaactcacttccaacaaatgttttatctgttttcttatcttgtttattatttatgtcattataatacacccgttaattctatttgtcaatatctttttataaataattatattttctgttaatttatatcctgcacgtgtattaaacacatatttccccgcaaaaccacttcacagggcagataaaagaccgcatcctgcggatacggtcttttatctgaatatatatgtaccttcaccccgggtaaacaggtggagccggcatataaatttacagcagcttatggaacgccaccagttcaattcgtgtgccttacagactcctggatatgtcttcacacactttcattgcctcgatcacggcacttctgaaccctctctcctccaatacgcggactgcctcgatcgtcgtccctgccggggagcagaccatgtcttttagttctcccggatgctttccagtctccagtaccatcttggcacttccgagcactgcctgtgccgcaaacttatacgcctgctgtctcggcattccgcctgatacggcggcatcggccatggcttcaataaggacgaacacgtaagccggtgaactgccgcttacggaaactaccgcgtccatgaggcgttccggcacgacttcaacctggctgaaactctgaagcagcgtctttacatattccatccctttatcgtccatatgctcattcgggcatgcagccgtcataccttctccgaccatcgcaggtgtgttcggcatcgtgcggacgatctttaccggtctgccgaacttctcttcgagccacgcaagcgtctttccgggcgcgatcgtgattatgatctgatcatctttaatatcgccctttatctcattgatcacgtcctcataaaactgcggctttacagaaagaacgatgacttctgccttttccacaacttctttgttactgtcagtcacatggatgccaaactgtgtccgcgctttctctctgcccggggcaaacagatctgctccaatgatctcctccgccggaatgatctgtttctcaatgattcctcccatgatggcagacgccatattacctgtaccgataaatcccaatttcatgctgcataccttcctctctcaacatagtttatttcttgaactgcaggtgtttcatataatatgtaattgtatacattgaaataatttgtatacaatttttctatacttaatatagcactgcatttttcaaaagtcaacatatattgaaaataatattgtttttttccttaaaacacgttataatttgtatacaatacgaaccagtgtatactaatcgttttcatccgtctgaatatatttatctaatagaaaagaggtgccctatggctgaaaaaacgatctctctggccgaccaggcttatgaaaaaataaaatcaaatatcctgaatctgagctacccgcccggaatgtcccttactgaggctatgctcacaaaagaactcggcatgagccggagtcccgtgcgcaccgcaatacggatgctgcaggcggaaggtcttatcgttacggactattataaatccatgacagtgaaggagatcacagataaggacatcaacgagatctaccagctgagagaactgctggagggcgaggcctttaaaatgatattttccgaaaagcgccatgaagagttttcctaccgcatcgaggagaagatcgtgcgcatgtgcgccgcggcgggagacgtctacgagtgggaagtggcggacactgccatgcatatggagatcgtcagcatatttgaaaatgagcgcatcaacaaaatttatgaaagtaatctgtcggaactcatacgaatgggacaatattctataaaaaacggaatgcatataccgaaaacgaatgagaatctaaagaagatggtgcgttacatgagaaaaggggattatgaaaaatcatttgaaatattgaaggccgatcattttggaatcggcaaaaacagtgcactgaaaaaaaacagcgtttaagactgtgtccgaaaacggccccgctcgcatcacacgatgcggcggggccgttgtttcgggcatatctactttacacacccatttcttcgatatatctgcaggccgcaagagccgccaccgaaccgtccgccgctgctgtcgtgagctggcgcacttcttttgtgcggcagtctcccgctgcaaagatgcccggacaggaagtcatacagtcttctgccgcaagaatataaccttcttcattcagctttactgtctcctcaaacggatcgttgtttggcttttgtcctactgctataaaaactccctctaccttaagttctgaggcttcacctgtcttcttgttcaggatgccgacactctctaccgcatctgtgcccttgatctcagacacaacgctgtcaagtacaaatgatacattctctctttcactcagtgacgccacaagatgcttctctccccggaattcatccctccgatggatcacatacacatggctgcagtattcgcttaaaaagactgcatcctgaagcgcagtgctgcctcctcctacaacagctacatcgctgcctttaaagaatgccccgtcacacaccgcacagtatgatactcccgccccaacaagcgcctcttcacgcggtactccgagatggcggtgcgttaccccggttgccaggatcactgtcctgcatggtatctccgcatcttctgtcacgacgatcttgttcccgccgtcttttctgacagctttcaccttcgtatattccagctctgccccaagggcagatacctgttccgccatcgctgttgcaaactcactgccgcttacttctgcgattccgggataattctctacgtgaggagataacgtaatttgcccaccgaaggttgttccttcgatgagcaatacttttttccccgcacgcagtccatagatcgcagctgtcattccggcggtgccgcctccgacaattacaatatcatacataggactacctcctcataagagtaatctaattactctctgtatactttttaatgttcgatgcattggcaagcttttccacaccgttctcatctatgacgataagtgtcggcgcctgctttatgccatatttctccacgagatccgcatgttcttctgcatctacaagcatataatctatgtgtgccttttccagcatggcttttgccatcgtacagttcgggcatgtctttgtagtgaaaaggatcttctgtggttctcctgtctcctgctttggcacttcatcaatatgttccccggattttgaagtaatatgcagcttggaatgactcaggtcataaacctttctgtccttgaattcctgtgatttaccgtcgttccagttctggaccggacggtaataaccggtgatcctgctgtatacttccgtcgtctcgccgcattccgggcagctgtactcttctccgttgatatatccgtggttcttacagatcgaataggtcggagacatcgtatagtaaggaagcctgtaattttccgctattttcttcacaagtgaagctgccgacttccagtcaggaagcttctcgccgaggaacgcgtggaacactgttccggatgtatataacgtctgcagttcgtcctggatatcaagcgcctcaaagatatcttccgtataccctaccggcaggtgggaactgttcgtgtaatacggtgtcccgtctccttctgccgccgtgatgatgtccgggaattgtgccacatcgtgctttgcaaatctgtacgttgtggactctgccggcgtcgcctccagattatacagctcgccgtattcttcctgataaccggaaagccgctccctcatgtgattcagcactttcttggaaaattcctgcgtcgctgtgtctgtcatatcttttccgatccattttgcgttcaggcctgcctcgttcattcctatcaggccgatggttgaaaagtgattgtcaaacgttccgagatatctctttgtatacgggtaaagtccttcgtccagaagcttagtgatgacagaacgcttcacatgaagcgagcgtgccgcgatgtccatcattttgtccagacgcgtgaaaaactcttcctcatccgctgactggtaggctattctcggcatgttgatcgtcacaacgcctacagagcctgtgctttcgccgctgccgaaaaagccgcctgatttcttgcgcagttccctcaggtccagacgaagtctgcagcacatacttctgacgtcgcttggctccatatcactgttgatatagttggaaaaataaggtgtcccgtattttgccgtcatttcaaataaaagcttgttgttctctgtctcggaccagtcgaaatcactcgtgatggaataggtcgggatcggatactggaatccgcggccgtgcgcgtctccctcgatcatgatctggataaatgccttgttgaccagatccatctctctcttacagtcgccgtatgtgaagtccatctctttaccgcccacgatggccggcatattgacaaggtcattcggcaccgtccagtcgagcgtgatattggaaaacggtgcctgtgtgccccagcgggacggagtgttcacaccatagataaatgattcaatgcattttttcacatcttcatactgcaggtcatccacctttacaaacggggcaagatatgtgtcaaaggaagaaaatgcctgtgcgcctgcccattcattctgcataataccgagaaagttgaccatctggttgcagagcacgctcagatgctttgccggtgaggatgatatctttcccggaatgccgccgagtccttcctggataagctgctttaacgaccaccctgcacagtagcctgtgagcatggacaagtcgtggatatggatgtcagcgtctctgtgtgcctgtccgatctcatcatcatagatctccgacagccagtagttcgcagtgatcgccccggagttgctgagaatgagtccgcccacggaatatgtgaccgttgaattctccttgacgcgccagtccgttaccttcacatagctgtccacgatctctctgtagtccagcatggtggaattcagattacgtatcttctctctctgttttctgtataaaatatagcccttcgccacatctgcatatcccgccttgatcaggactgcctcaacgctgtcctggatgtcctccacctgaacgagcgaattctttatctttggttcaaaatcagcggtaaccttcagcgccagcagatcgataatatcctgattatactctttctcctgtgcggcaaacgccttgctgatcgcctcgctgatttttgtgatgtcaaactttgctatctgaccgtctctttttgttacttgatacatgatagagcctccccacttattctttttttcttccgttctttatacaaatatcattttcatttgtcggttcttttatcttaccactcttctggtatgacagtcaacaaaaataacaacatattgtgcgtttttttgattctttcacaacatgttgttattgcatagttatgctataacccgcgtatttccgcggtctgcacgtatttttccaccacttccagcgcctgttccataatttccctgttgtatccgtgaagcccttcctgtatgagatctcccgaatctacaaactgctggaggtagtaccgctgcgctcccctgatccacctgccgatggactcaaaatccgagcgctggtgaaactccagcacaacggtggtgcggaattcatagggcacggcgtcacttagaagatactggacgcttcggtgtatgttccgtatgtcataatccctgataccgatcgtcttcccgtaactctcctgggaattcttgatgtccatggctacatagtccacaagtttttcgtccacgagtctcttgagcttatcaggaaagcttccatttgtgtcaagctttaccgcgtatcccatctccttgatctgcctcagaaatggttctatatcagactgtatcagcggctcacctccggtaacgcataccccgtccagcactcccatgcgctttttcagaaacgcagacacctcttcctgcgttatctcttcgttcttataagtatctaccacaagtgaagcgttgtggcagaagggacaccggaaattacatcctgctgtaaatatggtacaagccactttgcccggataatccaaaagtgtaagcttctgtaaaccttgaatcaccatacatcttcctctttcctgtaacatatttctatgtcttattgaacgccggcacttctataaatctgccttatgaaacatattatgccttaaaatgttccatcatgaccggcatgcattctctgctgtaccgggtgagggagtagcttcccttgttgaggcaccagtcggatacgagcgccctctcacacatggcatagtatttcacgatctccctgactgtcctgtcggcgcggatctgtccccgcctctgcccctcctccacaactttggtgatgagcttataatatttgcggttactgtcaagcaagtgtacctgaccgtccgccacaagctgggtggagtaaagagacgcgagcaggtcaaggcttatcttctcttccatcatagcgtgcatctcggcattcagatacaacagctttacaaaactgttcatgcctgtatccatcttctgttccagttcctcatagtaatcatccagtataaacgccagtgtattcagcagttcatctttcgtgttgaaataataataaaaagaacctttcgacgtccctgacagttcaatgatatcatccacggtcgttccattgtaacctttgtcgtgaaacaactgccacgccgccgatacgattctgcttttaacacctttcttgtcttcacttttccccatgtcgtccctctttctctcttcctgtcggtatatatgtatataaaacattctaacataaaagcatttatttgaataactactttttccattcatggcacaataacttatctggactcaaagccggcctcccgctccagagggatcccctcccagtctatccagtctatctcgatgaaactgttgttatttatgccggtgagcagtttatttatcatgggctcccgcccctgaacctccatcgtcacggttccgtcccactcattttgcacccagccggtgagcccgagcgaccttgcaagatatttggccgtgtagcggaagcccacgccctggactctgcctttaaacacgtaccgtctgcggatctctgccatcttatccccactttccacattagttttccatcctattgtagacttttttacagagaaaatcaattggggacagggtgaaacgcggctggggacggaggtttttaaaaaaacctccgtccccagccgcgtttcaccctgtccccagccgtttaactaaagctctgttctgtccgctcgatgatttcgtcctgcagcgccttgctcagatttctaaagtgatcgctgtagcctgccacacgcacgatcagatccttataatcttccggatgcttctgcgcctgtatgagtgtctctttatcgataacgttaaactgaatgtgatgtccgtccatgttgaagtaggtgcgcacgagattggccatctggtcaagcccttcttctccggcaactacactcggtgtgaacttctggttcagcagtgttccgcctgtctgaaggtggtccatcttggcacacgatttcacgacagatgtaggaccgtttgtatccgcgcctttttccggagagattccctcggatacgggcttgtgggccagacgtccgttggggcttgccatcatgacgtcaccgaagtatacgtggcacgtggttggcagcatgttgatgcggtacataccgccgagcatattcggccgtcccgtcacctggcttctgtagtattcaaacacatctttcatgatgctgtctgcatagtcgtcgtcatttccgtatttcggcgtcttgttgcacacaatattccagatcctgtcatgcccttcaaaattatcctccagcgcctgcatcagctcttccatcgtaaatgtcttcttttcatatacgttgtacttcacagcggccagacagtctgtgatcgttccgatccctactccctggagatattttgtattgtatcttgcgccgcctccattgtagtctttccctttggagatacagtcgttcgtgatgatggataagaacggcaccggcatattttctgcgtatatcttctcgataacattgcttccctgcactttgatatcaatgaaatatttcatctgctttttaaatgcgtcgtaaagttcttcgtatgtctcgaagtccgccgcatatccgagctcaaggccgagctgctgcccgcttactttatcgtatccgttgttcagtgtcagttcaaatatcttcggtatattaaagtatccggtgagaatatatgcctcgttgccgaacgcccctgtctccacacatccgctcgtgccgccgcgccttgcatcctccagtgattttcctgcgttgagcagctcctgtacgatggcttctgtgttgtagaatgccggctgtccccagcctttgcgtgagatctcacaggcacgtttgaggaacttctgcggtgtctttctgctgatctgtacattggaacttggctgcagcagcttcatctcatccatgcagtccagtatgagataacttacattgttcacgccattctctccgtttggagcgattccgcctgtgttgaggtttgcaaaatctgtgtatgtgctgctctctttcagcgtgatcccaaccttcggcggtgccggctggttgttgaatttaacccacagacactctagcagttccagcgctttctcatcatccagaacgcccgcttccacatccttttcataaaatggattcaaatgctggtcaagacgccccgggctgtacgcatcccatggattcagctcactcgtgacaccgagatgtacaaaccagtacatctggatcgcctgccagtatgtctctggcttatgagccgggacaacgtcacagttggccgcgatctgaagcagttcttccctgcgctttggatctgtctccttctgtgccaggtctcttgcgagggccgcataccgttcgcccaggatcataatggcgtcgcaggcaattttcatgccctccagctcatttttcttatccaatgcctccggatcatgaaagaaatccagcttatctatggatgcctggatatcctccttataatcgagaaatcccttttcatatattttcacagaaccaaccgtatgtcccggtccgcgctgctccataaattctgtaaacagtcctgcttcgtacgccttcttccactctggtgtcatctgtctcaggatcttgttgcggatgcatctcttatcccagaacgggatcatcactttttcctgtgtctcaaaatctttttcttttaccttaaagcttatgagttcccggtcattcatgacatgcatatcttccatcgtatggcagcacagttccggaaatgtaggagatgcctggggagagtcgcctttctcgcccacaatgagctctccctctcctatgtataaagtcttcgctgcaaaataatctttcagtacctgcgcgcgcagttccggaacagacagggctccctcgtatgtctcatacgtctttgtcatactttcggcccgctccatgtcaatatgtgccggtgtgtccaggctgagctttctgagtttcctgatgcgttcgttcattcctctttcttccattttcttaacctcctatttttacattctggaatcctgattgtttaaacagtgtcacaaactgctccatctcttcgccggacggcgcgtgaagcctagttccgccatatgtaagcccaagcttttcatattttcctgagcctgtattgtggtaggggagaagatttatattcgccaccctgatctgtttctccctgaggtatctgatgatctcttccatatcttctttcgttccgtttacttcccgtatgaccggaatacggatatatatacgggcgcctttgctgctgatccgttccagattctccagaatctgttcattccccatgcccatatactttttatgtatctcgttgtccatcgtcttgatgtcatacaaaaaggtatctgtatatgggagcagccgttcaaaattttcgtacggcgcctgtccgcacgtatctatggtcaccgatatgcccatcctgtcaagcctttttacaagttcttctacgtaatccatatccgccatcatgacttccccgccggacagtgttactccgccgccggattcttcatagaacatctcgtcttttctcagctcttttaccagttcactgaccgtatattctttccctgccacttcccgcagattcaggttacagctgtccacacatgtgccgcagccggtacagagcttccggtctgtgaccatctttcctgcctcttcccgcacggcattctgcggacagaccacggcgcagcttccgcacccggcacaccgctcactgtcacagagcagctggggcttaaagcactgcgtctccggattgtggcaccagaggcatttcagcagacaccctttaaaaaataccgtcgtccgtatcccgtcgccgtcgtggatagaatacttctggatgcttgttatcaaactcatttcttcacctcacacgttgttcgtttgttattagactaacgttcgtactttagtctaaacatagcaaaaaaacagctccttgtcaataatttatcaaggaactgcgtatcatttcatgaaattcaatatattatatccagtatttttgtgcacatttcacaaagcatctttcggcgcgccgacgccgtaaggaaggtcaaacaatgatatctgcatatctctgccggactgtaccttacgctccacgatcgtctcatctccgcgcagatgtccgacaagaagcggtgactccgggtcgtgctgagcatgcttcttcttagcgctctcagcgcctcctgtagcgtaacaataccggcatccgttgacacaggtgtcgtacatcccaatatcaatactctccgcgcatctgcattcttttctctgtccggcgtcctttttcagatcaagtttatagccgatgatcttgcgtattttctccttatcgatacaggcgctgtgatgtatgccgtacctctccagatttattttctcagcgcaggtgtacagcgggagtttgtacttcccggcaatttcggacagcccctttgccgcctccagcatatcttcctcttccatctccggataaggattctctctgcagccgtccatgaaactgatgatacaccggtctgtataattgtgaagccattcgcacatcatctcaaacttttccagatggtagccaagcgtgtacttcccgctcaggatgatcggatcaaacctccagtcgacccgctctctcccgagacgctcggcaagcagcacaaaagtggccatcgattcctctgttgaaggtatattttcctccatgtctttctcataatcagtgacagtcatctgaaagcaataccggtatccaagccggtcgatctccttgagtccgggcaggagcggctcaggattcttcgtccagaacacaatacaatcaaccgtatccggtgacaaggcgatacggctgatctttttcctgttgtatggatttggcactaatatctcccccgctttcaggcggttgacaaaccagtccggataacacgcggggatatcggttcttctgcttgcgctgattatcatctctgctctcctgactcctttaattctaataatatactgaaaaaataaagttgtcaaaggaagaaaaattccattccccggtgcctgccatacctagctcatactgtcttctttatagtgctcaatcctgtaatcgatcactcccatcacagcgactgccgccagtgcggaaaacatcagcggaacgctcagccagaacggcagttcataatgaaatacaaatttcagggacagcataacaggcatatatatcagaaatacggtctgccatattctgttgcacatattcctgtagctttccagacggtagattttatccagcttcattatcttcactcctctcatcttaaagaaatcgttctgcatatccatcagagttacatccagctcatcaaaagtgtcgttcctatgcataagctcgtcacagagacctctcgcttcggacagctctgccagctctctttcaagcgctgcctttctcataccgacaacgtccgaaactgtccgttttccttcttttaccagcttgatatccttcaccggaacgccgagcactctcaggaatttgatctttttcagatcttccacatcctgcatgctgtactcccggtaattattttccttatttctctccggagccagaaggccttcgtcctcataataacggatgtttgcttttttcatatctacgagattttctacttctttaattgtcaaatgtattcctccttacatgtatctaacaccttaaagtaacttgaatgtcaatagttttctgcattgttaactatattttttatcaggttgacaatcttttgattttcagatatactgcctacagaatcatttatgaggaggctgctatgaacgaaagaaaattatccattcaagatatctgtactatcagtctgtgtactgcagttaccgcaattatggcacagatatccatacctatgccgatgggggtgccgatgaccatgcagacgtttgctgttacgctcgcggcggtcatactcggcgccaaaaagggcgctgccgcttcgcttatctatgtactgctcggcgccgcaggtgtaccggtcctggctaactttaccggcggttaccaatatctcatcggtcctaccggaggatttcttcttacctttcctgttatggcatatatcatcggacttggcgcagaaaagttccggcgcgcaaacagcggcttcattatctgccttatcctgggaactgctgtgaactacatcggcggcatcgcgatgttctgccttgtgacgggcagcagtgtgtgggccggcttcaccgcctgcgtacttccgttcatcccgaccgcagtgataaaagccggactcgccgccgcgatcgggcttaagatccacagaaggctggtgagcgccgcatgcgtctgagaccccaccacctgctctgtacgcagggctactccggcaaaggctacagcccggaatttgtaaagaatatggatgcagtcgtccgccgtctgcggacagagcagaagacgccgatagagcttgtcttctccacagatgatctctgttcctgctgtcccgatatgcttgcctgcgatctgtgccgggaaaacgaaaaagtgaagcggtttgaccgcaagactgccgaatatttcgggctcgaggaaaagacatacatataccaggaactgacagcccacatacgcagtcatatcacccctgaaatactggaagacatatgcggcggctgcagctggtaccctgtgagcgcctgccgcaaaaacataaccggtaaaaaataagttccatctgtccgggcataaaaatcaggccggaacctgcacgcatcatgtaaggttccggcctgtattatattcatccgctccggaccgttccggtacagacagcttctatccgaaattcttttccaccagcctgcagtattcttcgtatgcctccacaccgccaaagctgtctgcaagtgcatcccggattcccttatagtaccagccgatcatcgctttgtctttcatgcggaacctctcccacagcttttccccttccacaggatagtctctgtcaatgtctctcatgttagacagtttatccgcaagccctatcatctggacttccaccggtgaccttccgatatggcggatcgtcgcgcctttccgctccacccatgtcttggatttgtcctcactttcctgagcgaccatcaccgccaccctgacactgaattctttcgcgagcacttcctccgtaatgccttcacaatcctcgatcgtatcgtgaagcaccgccgcgcttatgacctcttcgtctttcgtcatagtggacacaatatcccccacctcgacaggatggacgatatatggccgcctcgtcccttttctgaactgtccttcgtgtgccctcgttgcaaattcaatcgctttgtcgatcatactgctgtacctctttcattcataaggttcttaagtttctgcatcttcttcaatttcctcacgaagccttgctttttcccttttgtggaacaagtcaaagatacatggaactacgactaaagttaatatggttccgtatatcaggcccccgatggtgacgatcgccatcggctgcaccatatctgcccccatcccgactccgacagccagcgtcgacaggccgagtatggtcgtgagcgccgtcatgataatggggcgcagtctcgttctccccgcttccaccagcgcatcgtggcgggacagccctcctgcgatcagctgattcgtataatctataaaaacaataccgttgttgacgataatacccgacagcatgacaaatcctaccatagcgatcacactgaccgccttccctgcgatccacaggccgaacagaccgcccgtaaatgccagcggtacggtgaacatgacgataaacggagagcggagcgactgaaactgtgcaaccatgataagatacatgaagacaagagccagtccgagcattttaaaaagttccgtcatagactcgttgatagtctcatcttctccaaccatcttcacttcatagccgtccggcacatcatacgctttgagcgccttatttacacggctgctcacaagaccgatattgtccccgtcctttacctccgaggtgacagacatgtatctgctctgatccttcctgctgatcgcctgcaggccggaagcgtcctcaaatgcagcgatatcggaaagcttcacttcctccgaagtcccgtcctgtttctctgccgtaactgtaagcttccgtatatcttcccgtgacaggctttcgtcggcatcatccaccacatagatatcaaaatcctctgtatctgtagagagggaggttgccttctgggcttccgatagtcttttgttcagactctgatacacctgcgcgaccgtaagtccatgctccgtagcttttgtcttatctacgattacgcggagttcttctttgttatcctccgttccgtcggttacgttctgtgtccctttgatatcctccagcatactcttgatgtcgcccgcgattttctgcagtttatccagatccttgcctttgatctggacattgatccccgaacttccaagtgcgctcatatccatattcgacatattgacggtcagttctccgtccatgtcttttgtcactttctctatctctttcttcagttcattgttggacatggaaggcttatcacctgtaatagcgtaaaattctaccatatttgatgaagacgatgttcccatcatatttgatgaagagaccattgcccctatatctttgacgtctttcagcccgccgacccggtccatcaccttatcggcagcttttgccgtatcttcaagacttgtgcctttttccatctccagcgtcatgctgatctccgtgctctccatctgaggcataaattccgttcctcttgagatggcgagcgcgccgctcgccacgaacagcacgaacgcgcctgccagtacgagaacctttctgttaagcgcttttgagagcatgctgccgtaccagtctttgatcctaataaacaggcgggattctttttcctctgtcttctttaacaggcctgcagatatcatcggtacgagcgtcagcgccacgataaggctggccaggagtgaatacgcgatcgtaagtcccatatccacaaacagctggcgtgtaataccggaggtgaacacgatcggaaggaacacgcatatcgtcgtaaaggtggatgccgttatggctcctcctacctgtctggctccttcgatggccgccgttttggctgacgcgccttcctcattccgcatccggtagatattttcgatcactacaatggaattatctaccagcattcccacgccgagcgccaggcctgacagggatatgatattaagtgtcacacccgagaaatacatggcaacgagggcagtcatgatactgatcggtatggagcaggcgatgacaaacgtcggccgtatgctctttaaaaatacaagcagtatgatgatcgcaagcactgccccgtaaagcagattcttaagaacggaattgacgatcaggtcaatgtagactccctgatccatcaaagtcaccgcatttatttccttgtgctccttactgatagactggagcttttccagaacgcggtcactcacatcaccggtagagtacccggtctgcttctgtatgctcagcatcatgccggactttccgttgatcttggcatatgtctcatctgaattgctgacaagctctacatttgcaacgtccgtcagcttcaccgggtcgatgccctccatgtcaatgagtacaagattctttatgtcttcgatgctcttaaacttatcgcccacacgtacgagatagtccagcccgttctccgtcacatatccggccggcatgctgaagttctcggctgccagcagtgtcttcaccatatcggcgttcagcatgccgcttaagtcagcactggctgacgcttctccttttgcagcctccatctgggcttcctgggactgtatcatggcctctccggccgcaagctgcgctgcgccttccccgagacccgccgcggcctgaacctgagcggatgccagctggcctctcgcctccgccagcgacatggccccgttgttgacctgcttctgcacagcttccagctgctgtctgccggctgtcactttcccctgtccttcttttaaggaagcctcctgttctgtaagctgtgcgacagtcgcttccagtgctgctttggctgtatcataattgtccaactgtgccatctgtactctcagctgctgcaactccgcatcttcttccggagtacgtcctgtcccctttgcgtcaagttcagcataccggcttcttatctgagtctcacttgctttcagtgtcttaagctgggtaagctgcgcctccgctgccgccttcgaggcctgaaccgctgcaagcgactgctgaagctgcgtatccgtcacgttcagctctgccatcttttccgtgatctccagctgcgcctgcttgatctcctccgccttctgcgagatctgggcttctgcttcaccgacaccggaagatgcctgggccttgccggcagccagcgcggccttgccgttagccacctggtccttagcctgctgaagcgcggaggctgcttcgttcatcttttcttccagtgcagctttgacgtcttcatttaacgcttctaccttctgttcatttaccgtgacctgcacagtttcctcgatgctgccggcagtggataccgaggcaacgccttccacactttccacttcaggaagcacctgttcttcgatgatgcgcgtcgtctctgccgcatcttcccccgatgcgctcactgccgtgataagtacaggcatcatacttggattcagtttcataataatgggattcgttacttcatccggccagaaaccgctgatttgatccagtccttctctcatctctattgtgacagaatccatattggccgtctggtcaaattcgagaatgactgttgaagcattttcattagacacagattgtacattcttgatattgctcaccgttgccatcgtctgttccacaggctttgtgacaactgtctccacttcctccggactggctcccggatatgtcgtcataactatagcataaggcagattcatactcggaagcagatctaccgtcatatttccaaatgatacaataccgaggattatgatcaacacaactcctaccactacagtataaggtctttttacgctgaattttgataacattgatgtccctctttctaagttttagccgcgcctggcatatacagcccgatcatgccgccgcccgcacaggcagtccaatcgctgatacgtaaataatagcacttgagggtttaaatagcaacgattccggtatataataattgcaggaaaaatacgattttagatttattttataattggtttaaaaaacagaaggaggatacaacaaatgtcaaaatatgtcctgatcacaggcgcttccagaggtattggaaaggctgccgccgttctctttgccgccagaggttatcatgtgtttatcaactgccgccgttctgccggcgcgcttgaagaggtcaaaagagaaataatatctgcaggtggttcctgcgacatggtgacaggtgacgtaggggacccggaagatgtagataaaatattctcctttatatacagcaggtgcggctgtctggacgtgctcatcaacaacgcgggatgtgcccacatcggtctgttaagcgacatgaccgacggggagtggagccgcgttatccagacgaatctgtcttctgtattttactgttcgcgcgccgcggttcctcccatggtgcgcagaaagcagggtaggatcatcaacatctcttccatgtggggtacgctcggcgcttcctgcgaggccgcctactctgcgtcaaaagccggggtacacggtctcacaaaagcgctcgcaaaggagctggcgccgagcagcatacaggtaaatgcccttgcctgcggcgtcattgatacagaaatgaatgctcagctggatgaggaagaacggctggcacttacagatgagatcccggccggccgattcggcactccagccgaaactgctgaaatgatctggaacatagcaactgccccgccatatatgacggggcagatcataggtatagacgggggcttttaacacagatcgagctctaccggacagtggtctgaacccatgacatcagtgtgtatcctggcatcctcaaggcgctctttcagactttgtgatacacagaaataatcaatgcgccagcccgcattcttttctcttgcccggaaccggtaggaccaccaggagtagatcccctcctcatccggataaaagtagcggaatgtatcaacaaaaccgaacgcttttatcttgcggaacttctctctctcttcatcggtaaatcccgcattctttctgtttgttttcggatttttcagatcgatctcttctgccgccacatttaagtctccgcagaaaataaccggtttcttttcttccagcttcttcagataagcaagaaaagcatcctcccactccatcctgtatgacagtctggccagttcgctctgggaattgggcgtatacactgtcacaaaatagaattcctcaaattccagcgtgatgacccggccttctttatcatgttcttctattccgataccgcacgtaaaagacaacggttctttctttgtaaacacagcggtcccggaatatcctttccgctctgcataattccagtattgaaagtaaccgggtgtctccagttcaagctgcccctcctgcatcttagtctcctgtatacagaaaatatctgcatccgcctcctgaaagaagtccatgaaacctttctgcacacaggcacgaattccatttacattccatgaaatgcacttcatttattgtcctccaattatgtctagtcttattaataatacacttttctcagaaacagacctctcgccggcgcaagaaaacctgccagacttctgtcctccgccgcgatcacgaccgggagcatggctgcgtccctcttgccggtcccgatctccagcagcgtgccggtcagtatcctgaccatatgataaaggaagcctgtcccgtaataggtgatacggactttatctcccgtgcttacaatttttatattcgtgatcctgcggaccgggtccctgcactccttgtcatccgtaaagcttgtaaaattcttcactccgacaagatactcgaccgcattgcgcatcgcctcgatatccagtttctcaggataatggtaacaatatctgcgggaaaaaacatccggcttctcacgacagtcgatgtaatattcatacttcttgccctttgcgctcttacgggcgtggaatccgtttttgacgagctctgccttgacgatcctgatatcctccggcagatatctgttcagtgaatccttaaactcctgcggatcataaagcttggacagcttgacgctcgccacctgtccgcgggcatgtaccccggcatctgttcttcccgagccgtccacatgcactctgtaaccaaccagtttcccaatgctccactccagcacgaactggatcgtattgtctgtcgtggcctgtctctgccatccctgatatctgcttccgtcgtacgatacggttaatttatacgttctcatctgcatctcacccaatctgaatctacgtctgttctctgttacttatcatcatctgtttgcccgattattatgtatgctttttgaaccgcttacgttcaataagtatgtcaaaaatagatctaagtcccatttaagctcctgttctcctgaacagaataaaaaggaagaagcaaatgaatcctttgcttcttccttattctaacactatacgacatatttcgtaaataccttcttacacgtattcctaattatccaggatttttttcagctcatccataaaagtattgacatctttgaactctctgtacacagaagcaaacctgacataggccacctcatccagacttttcatctcttccatgacgatctccccgatcgtactgcttgggatctcctttgcctcaaggctgaagatcttcgtctcgatggcgtcaaccgtcttctggatggcatccgcagataccgggcgcttataacatgcgcgcaggacgccgttctctatcttcttgcggttgtactgttctctgttgttatcttttttgataatgatgagcgggatcgtctccactttttcatatgtggtgaaccgcttgccgcacacgtcgcaggagcgtcttctgcggatggaacttccgtcctccgccggtctggaatctatgactcttgtatctaggtggttgcagtatggacacttcatcttgacccaaatcctttcttctgtaatacatatagtatatctgctgtacggacagaagtcaaacaacattgccagtttttccctttattttttctcctcatgaatttctaccaaaatgacatccggaccgattcttttgatgcacttgcacgggataacatactcgctcccgtccccgaaaaaaccgcagaattttcctgacttcggaataatgatcgcctccacgtggcagccgcagtcatccagtatcagatccgccacaaatcccagtctcttacagtcacatgtattgatcacttctttatcctgaagctcactcagtctcatacaatatccgcctcccgaatcgcgcagaatgcacaagggggccagaccccttttgaaaggggtctgaccccctccggccgcatctgcttcttgtttacagtatatgcagccggatataaagtgtcagacattcataactttttcgctctggaaagcttttacgatcacgccgaggagtacgccgccgatcacaagcgtctcgatgagtgttatgccgtactgcagcatagacacattctgcccaagtatccccttcatcacgagcgcactgttatacagcggtatataatagtccgtctgtgtcgggtcgccggtggtgaacatcgtcagcagccctaccacaagcacgagcatatatgccggcatcacatatgtacttgcctccttggtcgacttggcaaatacggagataagggcgatgatactggagtacaggaaggctatcgccacaagcagcgctccaagcatgactacctgctgtacactcaggctgatattcagcccgtcggctcccgagccggtcatggacttcatcatcagaggcgcacaaactaccatcgcaatgacatagatgagggaagatatcccggagatcgtcatgagtgaaaatacttttccaaggacgattgaacttctctttaccggtgatacgaggaggcttgccatcgttcctctctccttctcgcccgcgatcatatcagtgccgatacccatggctcccgcaaataacagaatcgtaataaaatatggaagcatcattccgatcgccttgccgctggctttatcatcatcctgtatgatcatttcatcgttgtctgaatttaccgtaaacaccgtgagctgagtcagatctccgacgcgccccgccagaagtgtctggcggtatgcctccagtacgcctcctgatatctcttcataggccgccttggaataatcctcagacggattgtaataagtcttcacctggggcacagccatacccggctcataatcgcggaccgcgctctcaaagctgtccggaaattctatgatcagatctgccctgccttcgaggatatcttctttcgctttttccatcccgccgccgtctatcatctttgatttgaattcctgtctgctctcaccgagaaaggcttcaaaactggaaggttcgtttgccacatatacaactgcttcgtgtgattcaatatcatcttccatattggtaataagtccgcttatgatcgtcatgatcagtaccatgatcaatactgggagaaaaaatacggaaaacaccatcttcttgtctttaaaaattctggccatctctttgccgaatatctgcttgattccattcatcttacatttccccctttcgttccttatataattcaaagaacgcatcttccagatcatctgtgccggtcatattaagcagttcctgaagtgatccctccgccactttactgccgtctattatcacgccgatacggtcacaaagcttttccgcttcggacatgatatgcgtcgatacgatgacaagctttccgtcttctctcagcttccgcaggtaatctgtaacactcctggccgtgacaatatcaagcccgttcgtcggttcatcaaagatgacaatatcagggtcgtgtacgaggctgaccgcgatcgccgccttctgcttcattccggtggaaagctctttgatctgcttgtgggcaaaatctttgatcccgaaatatgtaaacagctcttccttgcgcttctccagcacatcctgcggaacgttatgaagcctgccgaaaaatccgaacatgtagtccacgtcaaactgttcatccagctttatatcgcttgtgagaaatccgatgctctccctcaccgcctccggttctttctgtacttcgtggccgccgacatagatctcgccatccgatggcctgatcaaagtagcgatacatctgagtgttgtcgtctttccagcgccgtttggtcccaaaaggccgtatatctccccttcgcgcgcggtcaggctcagattatccacagcagttttcttcggattctttgtcttagattccagcatctgcttcttattcagtttatagattttcgtcaaattcttaatctcgatcataaccctgctcctcatttttctgtattattatgttaatacaataatatttctttttctcctgtttgtcaacataattataacgaacgggacgtaattattttcatcacaccgccgcacaccgcagaaaatgccgtcacgactacaagcgtataaaatacaatataattataatatccggcaatgacggccgccgtcatgaatacggcgatacatgttctgtatgctttcgcctggccttttgtacatatttcaattgtccgctcgtcatgttctttaatatacagcttccgcagatattcccggctcccaagcgccttagcggacacaaagatcccgtagaacattacaccggcccacacagtgaacagtccggcctggaacccctgaaagaagctccccgcatgttcggacgggtccatcgcatcggccctcatgtagcttatcacgatcaccgcgacggatactaatgcaaatatactttctaatattatgctgcgttttaattttttcctatactcttccatattcaaatatcctccacatctgaaaagtcaaacacatcttctatcattacgccgaagaaccgggctatcttatatgccagcacgagagatgccgtgtacttttcccgctccagcgagatgatggtctgccgggtgactccgaccgccatcgccagttcttcctgtgacagtctatgcgccttcctgagctcctgtatccgggttttcatatatcttttatcctctttctctattttgtacagtacgctttacacttttagtatagtttgctttacataatatgtcaagtgtattttacattaaattcagtgcggagagcgcagaaacgggaaggcaccaggccttcccgttaaatgtatttcgcttatttcttattcttcgatatctataacagacaccggacagccgtctcttgcgtcttttgctgtgctttcgcattccggcgccacgtcggcatatgcctctgcaataccgtcatcatcaaaacggaatacttccgggcagacagccacacaggctccgcaggaaatacatccttcatttactctggctttcatgggtcattcctcctcgcatttttccatagtatgtcccgcaaaactccaggttattcaaatttattttatgactgtgccggtctttcccttcaacgcttcttccaacttgtcaaatgatgtgatgagcgcgctccggccttccctcttttcaatgaatgccacagaagcgctgaactttggaagcatgttatattttccgaaatgacctgcctccatatattctttcgcctgctccaacgtgatctctccaagctcttcttcctccggccttccgatattgatcttaaccttctccacactcgtgagaatgatcagctcatccgcatcgatctcctctgccatctttccggcagccagatccttttctattaccgcgctggcgccctttagatggttgtcctgctgcagcacaggtatccctcctccgccgcacgcaatgacgatctggtctgcatccatgagggctttgacagcgtcgatctccacgatactcaccggatttggggctgacacaacgcggcggtacccctttccaggctcttccacaacatagtttccttttctgcgctcttcgttggcctcctccgccgtcatatagcggccgagtaccttcgtcggtgtataaaaagcttcatcataagggtcgacaacgacctgtgtcagtatcgtgctgaccgttctgtatatcccccggttcagcaattcctcacgtataccgttctgcagatcataccctatatacccctggctcatggcagaacagacagacataggcgccgccgtataatcctgatgcacccttccaaattcattcatagcggtgtggatcataccgacctgcggtgcattgctgtgggtgaccgccacctgatatccggcttctatcagcccggcgatcgttctggctgtatatttcaccgcttctttctgttccggcagcgtcgttccaagcgccctgtgtcccagtgctactactactctctttttcataatctatacctcgtttgatttaatggcgtacataaaatatatgaaaattatattatctttttacgataaatgcaacgcctttatttccataatatctcagtataaatcgcttcaattttctctattagcatgatataataacgctgtacgtacacatcaattagataaaagcaacagaaagtgaggacgaaattatgattgatttcaaaaacagcgagtatattaagctcaaagaaacagacccttctgtcgtaatgaaggatctggcgccactgctgatcgacggtgaacaggtgataggagtgtataaaggcatacgcgactattgtgtttttacagacaagcgtgttatctccgtgaatgtacagggaatgaccggaaagaaaaaggattttacatccatgccatactcaaagataagtgtgttttctgtagaaactgcgggtgttctcgatatggacagcgagctggaaatgtatttcagcggtgtaggcaaggtgaagtttgagtttaccggaagaagcaatattgtagaaatcggcaggatcatcggtcattttgcactgcaatagtatttatcgaatatttatttgaatgagagggatttttatgaaatgtccaaactgcggaggtaatatggaagaaaataagtgtccatattgcggtacagaatttgaaaaaaaggaagatagcagattatccggcacggattataagccatttaattatgcagactcaccttatcagtataccactgacaaatggtatacaaaaacatgggtaatcgtcctgttccttatctttttctttcctataggtctttttcttatgtggagatataaagagtgggggaaaatcacaaagatcgtgatcactgtcgtgatcgccctgatggcaatatgggggctgatatcgccgaacagcacaaaaagcacccctgctgcccctcctgttaagacgaccgcccctgcaaaacaggagactaaaaaagaaacggaaaaagcaacgcctgtacttgaggcatatgaaagtgattacagtgcgggtatctatacggcaggcattgattttccagctggtacatatatgctgacagctgtgagcgggagcggaaatgtatcttccagcaatatgttttccggaggattgaacgaagtcatgtctaatccaaaagacgagtattctgttgattcgttcggcaatgccgtcttgaaggaaggcgttgaactctccatcggaggtacggccgtcatccgcctgagcagcccggaagctgatgtttcttctatgaagccgcgcgccgcggtaccggaggaggctattgaccttggaagcggtaatttcacctcaggcgctgattttccggcaggcgtttacaatgtgatcggtaccggcgcaaatggaaatgtctcctcctccaatctgtacaaaggaggaatcaatgaaatcctcggaccgggaggcgatggtttcggcatacatgaatttaaaaatgtcagcctgccggaaggcgaaacactgactgtctcgggtacttcaatacagcttgtgcccgtgagataagaaatgcaaaatcatttcttgattttttccgcctcatggactataatatttcttgtgcagatatatgcgcagatgtagttcatcggtagaatgccagcttcccaagctggagaggcgggttcgattcccgtcatctgctttggcagaaaatatttcaatgaagaaaagcgatcatgccttcactgacaggcgtgaccgcttttttcatttaactgttctaacttctgacttcttccgtgcaccggactcagactactgtgtatctcttatattcgtaataacgctgtttttcagtatccgttttacaggaatatataatgtaataatattgattccgataaaaaccgcaaatgcgatcaggatcgaataacaggaatttctcaaataactcatgtcatatgttaaggcataccggaaactttcaatactgtcataactaatgatcgtacgcagtttataggcaaaccagacagcacatatacatccgcttatgatgaggatcatgattccctcgtacagatattcataataatacatttttctcaaatcaagtttactgatcccgagcgcctgcagtatacctgtctttttcctttcatgggcaagacgtcccgcatttccctgatacatcaacaataaatatagcagccagacagctgccgcaatcacaacggcacggaaaattgaagacatcagctgctcacgtatctcctcgtaaatcattctttcattagaaatccattcgcccttgtttattctactgaaataatcagccgtcacttcatccattttattaaaatccgcatcccctgagtatcgaaacttaactgcattataaagatttttgtctggtacctggcaaagtttatctaagaacctgtccccaaccgctataacattttctccgtactgcggggaggtgtatatgatactgcccacttttatctcctgcttcccccatggagaggatactgttatataatcccccggcagaatggatccatccttctcatatctatacacttttttcgttttgtccatatgctcctcatctagataaacaggttcataatcgatcacgtctcctccctggtcacgaatctggtatggagacaaaaatagaatgcattcctcaccctgatcaaataaatcttcattaaattcacctttagcatctatttcactgtagctggacagcctctctttatcctgagggctgacgccccggatttcattcagaataaaataatccccttctttcccatatggctgcgtactgttttgaacctgtgtatagcgccggtgtaccctgacatattcactgccgctccaaccattccagcttatggtgatcatctgctccataccgctgacatttatgtatttttcatattccgctgcttccatacccggaatcgctattacatcagcaatatttttatctgaaatcccttccgtcagatcattcgtattaaatatgtaactgtatccttcctgatctttccagaaacgataatcggactctgacttaatcagcagttccatacagactgcagaaataataattacaagaactgaaatgccaattctaaaaaatgttcgttctctaaaaaattttctgctgcgttttaccatacgtactatcgtaagtctttccgctctgtttatactaaacgcctttctttcatataactcattgtcctccttgtatgaggacttgatatccaaagtacagacctgcattgccatgcagatatagcccgccgaaaagacaatggataccgcgctgcatatctgtagtagatcaggccagttcacttcataaaccacacgaatatctaacacgaaacgtgcaatatttaatacaataaaacctcctgtaaatcctgcaatactaccggccagagcagagatgccaaggataataacgcacttccacagtgccagcagaaaaatctgtcctctggctgcccccagcccgcgaagaatcagcagactgtatctttcattttttgcaaatatcgtcaatatgtatccgataatgatcgtggaaatgagaagcatgaacataatatatttcccatcctgcaggaaataaaacgccagactcgtatcttccgggtatgctttttcattgaattcaaatactgctttgttttccgggtctattttggccgccaggtccatcagattgttatgattcatttcagaggccttaaataaataacatacatcattatcttttacatctgcagtctcccattgaattacagaaggcagagaaaagtctcgtatggcccagcctgttccccatgttttgaatgtgccggtcaatatatattccgctgccatctcctgcccgttttccaagtagcttaaagaaactttatcaccaattttaacaggcttatccagcgtctcaataaatgatgccggcagtacaatctccctttccgtctgaggccatttcccagcttttaattcaatgcgccccagctttcttgccgtcctgtcaatacttccgatcttaccgcattctttcccctctacatatacatcagctcctgcctttacggcgcctatattatatatccccttttctgccgccagagtgctcttcagatacgtatctgcatgtataacagcgcctgtccactctccatatttctggaatctgttttcttccaaggtttttgtataacttcccacaaatatgatcaacattaagttgacagcatacaacaggataagcattccagccagcagccgggtctcttttcttcttcctgtcagacttttaaaggctatttttctcatattttctcatcctatgatcataccatcctgcagccgtatcaacttatctgcctgtccggctatctcagtatcatgggttacaagcaacacggtctgatggaactcctgctgcatagtccttaatagattcattactttttttccggtcgcttcatccagattgccagtcggttcatccgcaaaaataatgcttggcttagctgctaatgctctggctatagccactctctgctgctcccctcctgataactgattcggaaattttaattttaaatcagtgatctccagtctcctcataatttcctttatatattttttatcaggaactttccggttcagatacagcggcattttgatattttcttctgcacagaattcgggcagtaagttataggattgaaatacaaagcctatcttttgtctgcgcagttttgccagttcgctgtcttttattttatgtatatccacaccgtctatgaatacatgcccggctgtcggtttgtcgagaccgcttaacatatgaagcagcgttgattttcccgaaccgctctttcctattatcgtataaaacagtcccttctcgattttgagatcgatcccttttattgcagaaaattttcttccgcctgtattataaattttcatcaatttttttgcttctaaaaccacttccattgtccacccccatttttatatttcctcaaagctgcgctcatcttcagtgtcttcgtacaaacgatattttatctgtttatttatatatatttttataatgttctgatattttaattttaaattactttttttggaaaatcaacactttggccgtaaagaaacaaatataataccgcagtataattatcacgattctccgcacactaacagcggaggtgattccatggcatcttatgttgcccctgcaataagggataagtttgaatcgttgtctatcaacttgaaaaactgtatcctggaacgtgacgtccgtctggagaatatacatgacctgatccatgttcttgaggatatagttaaagatggggaagcagagtaatctgtttccccatctttcataaaacttgtcgattatggactattctcgtctgtttatttctatttttatctttttcgttccttttatccctattttattgttacattagatacaattacttattgccctcaattattatggaaggaggaagaagtgtggaagaaatcaacagccttatatttaagcttgggattcgctcaacataccaaggtttctattatctgcaatatgctcttcatctatgtatgcttgacgaacgttatctgctttccgtatacaaatcgctgtatgtagacgtagccagaaagtataacacgagcagggataacgtcgagcattgtatccgtaccgtagtgtcaaactgctggtataagggcaatcaaaattttctcgtacagatagcaggatatccgattactcaaaagcctactaacggagaatttatcgatattctgtatcattatttaaaggcgcaggaaaattgaccgtctaaaagtaagcttaacgttaactgcccaatgcgtacataaaactccaggaacccactaatttgtcaggtaaaaaaagcggcgctcttcgccgctttttaattatacccatacgacttcacagtctgcaacagccgccttttattcctgccccgggcggcgcgccagttcataaactttctgaagcgcttcctcagcctccactggataatcgggctctaaaggcttcttgtcattcccggaatcggggcggtgaaaatatttgtaagacacggtaaacataagttttgcgttcggtgtctggaactgaagcagatcaccataactggacggcatcccccctgacacctcccccaccacatacccgagtttattatctgcgatagcgacagcaaaatctgtggcagcgctgaacgttccggatgaagtgagtatatatatcgtcccgtcaaaaacgagctctcctccgcgctcattggcgattttttctttcttatctgtaataagaaacggtccgtacctcacatccacgtcgccgtatacataataattgtcaacattgatataacgcagaaactcattgatcaccttagagtttcctccgccgttgtccctcacatctaccgcaatgttttcaatctgcttctgcttcacctccgtaaaaaattctcttaaagtatttgcgtacgtctcgtcatatatgcattccttaagggtaagaaccgctgtgtttttctcttcatacacgtgatagcttacaaaaggctctgtatcctggggatttatattcttattctcaaagcgcagcgttttctccacctgaccggccggtgtctccagaactaccgccgtatcttctgatacgtccgcgccgagaaatctcagatagtccttcctcactatccggttctcatataaaacagaagcaaatccttccagttcataagatgacagcccgagaaatgtcttataaaggtcttcttctctgacacctccgatagacagtatacggctgccgtcatactctcctccgacacatataaggttttcccctgtttttctgcaccggaacaacagccgcggcactgtttgcgcgtaatagggcataaccgatgtgtgcccgtccttcatacgggccatgattctggatatggaccgccataattccagcatactgacactgctgcccatcgcctctttttctttgtctccctgccgctttacctcatccgggagccctttgatacaggcaggatgccttgattcgatatgagacaggatataatctatatcctccaccgcctgttctttcgtcagcatgtcatctacagccagggaagcctctgcttcttccgctgttccccggtgcggattcatccatatttgataggctgcaaaaaagaggatcataattgtaaatatggcaagcagaacctttccaagtgtcttatttctattctccatattccctcccgttcatcccttttttatttataatacaagtataccttacaaatttctcataatcaattatggatgctttacactctgcggcaattaataaaataaaactccctgcttactgccttctcctatctatagactatcctcaattttgccggcggcttccataagcgacaaatacagattgttttctacactgtaaatgtgctggatcgaatccgacattttctttaggagtgccgtatctccttcaagagaaagctgccacagatcatcggccaggccgtcccattgttctgagacacggataaactgtctgcctgcatgggcgactttgtcattctgcagtatatttgacgcttccaatagaaatcctccgtacattctgcggaacaatcctccccctgtaccgcccgcttcattgatctgaaaataatttaccattccggtcttcttcagtttatccggactgaatttttcccattttaatatttcccttgaaaacttcatgattccactcattccaagaagccgcgcgggaggcgtgagcatcccttggcatgtctctgttatggcctcctgcaaaacgtcttttcccacattcgtgtaaccgctgaaatcaaatgtcagatatttattgttggccggaaacggcctgtgtgaactgcttcgtgcctcttccagctcgcggaaactgacaagatgataatcttctgcagtccagcctcctggaattctgataggattatcatgattgtgccggtcgcttatccggtacttcttctttaaatcatcatagccgtataatacaaccgcatgtcctccaaaatgactgtcacggtccatgcccagataactcatgtaaggcatatcgacatagatcaagaccggatcgtccgcatcgatcatgcgctttgccgcgtcactgactctggcataatttttgcccgacctgcactttatcgtaatattgagccgctccgccagttttttctcaaattcaaatacttttattcttccgtttaccattggtgctgtggaagaattcatatacaaaaatgacagaccggaagcgagaccgaatatcatttcttctgacatcgggtatccataataagtgaagatctgttttaacgaattcgtaatgcagtgcctgcctccctgtggtttgaagttttttacaattgattccatttttttactccttaataaaatttgatgggcagaatgatttcggtaatataatttgccggattgcctttaaaaatcattccgggacctttgacatagatttctcttgacggtgtcaaggtcttcaaaccgtgcttatttgcgaactcgaacatcgctttatatgcaagatacagcgtatcatagcctccgtagtgtaccgtcctcagccctctcagccctggcagcttcctgcaggatacatgggcgccggctattctgttctttacaggcaaacatatttctatatccgcattttccacacaggccgtgtcatagtagcagttaaacagcctgccgctcctgttgccgcccaccgctttgtaaaggagcggaacatacttatccatatcactgtaccagcctgtaaaccggatagaagcggctaacaccccgccgatgtccaccgtgccgatctgataagcatttaccggatgcccggttcccggcggaaacacatttctgccgattttttgtaacagctccttctctctggcaatattattttttataaactctgccttttcctgcagaataaacgcaagctccgcctcattttccaccgtatccgctatctccctgatttccataatagaaaaatccaatgaacgcaggaaactgataagcctcgcttttttcaagtcttcatcactataataccggtactggttttcctcgtttctgaaagaaggtttcagaatcccctcttcgtcatagtagcgcaacgcctttacggttaatcctgatattttagaaaactgactgatcctgtacataactgccctcctgtataatcataaactctcctccgcaccggaaggtcaagcccgatcgcgcctgtctacgtaattattttaaaaagacacaattactccgggagacccagaggattgtgtcctatcaatataccacatcctgtgatttcacgtattctttttctgatctattctttcgtctatcttttttttgatctctttaattttttcttcgtctatttcttctttgccggcaatgtctgtgagaatatctatcgccccgcacgcccttccaaacaagatatcgtgaaactcccggtactttgcccttacctcggctaacgtcctgcagtcgtcaaattctttcagattcagtatatcatgttttttcataccatatttacctccgggttaatcataactctttaagagggtacatctgcatggtaatatatggtattttttagcattccaggtgttatctctattttagtacggttaaatttcatttcctggaattatatgatactttcctcgatacaccatttcttaaacagaaactatttacaaatatacataccacttgcaacactattcaccttagttgtcactccctctaatgtaccctgtccctctttcgtaatgattatagctccattctgtgcaccatgaatcgtctcaaatggaaatgcagtgtttgatatggcgggcggaagtccagttactaatgtataattccccgttgtaattcccgatacagaaaaatgaaagaataccatgttgccaactttacgccaatagctcattccatttgttttaacattcgctgcatatgccggtggcatatgagagttccaaacagcttctttcagctgtttatccaattcccttccttgccgggcatccaatgcatacccttcttccgtcgtctcaaggttgtttgcgatattcaccggaccggccggtccctgctctcctttgtctcccttgggtccggtagccccctgcggtcctgtggcgccggtcgggccctgcgggccagttaatccctgtgggccggtagctccctgtggacctgtggctccagttagaccctgtggccctgtcgcaccagtttctcctttgtctcccttatcccctttcgggcctgtagccggcacaccagtatctgtgtcgccaatgtaccagtttccattcattccaatgtgtggtgtgataccgtcgtcacctcttgctttgactcccgtatcgtagttgttaataaaccagttcccattttctccgatatagatttctggtatgaagcttgtgttttcttccattttatgttcctcctttaatttttgtaactgcataatatcagtttgctgggggacagtgagggacatataacgaaaaaatttacattcttttatagtaaacgataactctgtctctttaatttacatatcttatttcttcaaggaaaagagagcctgtctccaagctcccacaaaacaaaactataatttttcgcagaccaatataatatacaatgtgccagaagcggtacttgtactggaatttgcaatgccgaatttatagctgtcattgctgcctccccaaccgtttaaatgaagtttccctgaactgccggctactcctcttggaatccaagttataagtttgtacccatcagggatatttagagctgcagtcacttcctttgctgtgttcccaggtatagatccggttgcaatactctgaactttaaaaaatgggaatctgtcatttaagatcttgccctgccttgcatccagcgcatatccctcttctgtcatctcaaggttgttcgcgatatttaccggaccggccggtccctgctctcctttgtctcccttgggtccctggattccctgcggaccctgaactccggcagcaccggtatctcccttgggtccggtggctccctgcggtcctgtggcgccggtcgggccctgcgggccagttaatccctgtgggccggtggctccctgcggacctgtggctccagttagaccctgtggccctgtcgcaccagtttctcctttgtctcccttatcccctttcggacctgtagccggcacaccagtatctgtgtcgccaatgtaccattttccattcattccgatatgaggtgtgataccgtcgtcacctcttgccttgactcccgtatcgtagttgttgataaaccagttcccattttctccgatatagatttctggtatgaagcttgtgttttcttccattttgtattcctccctttatttttgtaactgcatattaccagtttattgggggacaaggagggacagatattaattactataacagatattttccacgtgatcgtcgttatccttaccattttatcctaatgtataactgctgtgtttggttttacaaagagagcccgtccccaagctctcacagattctagaaacagtattaaattatcaagcttttgtggacaaataaaaatacatatgtacctgttatggtgtttgcacctatcccccaattatttgcgttataaatccatccattatcatataatacaactccgctctgcccgtctggtctggctgatacaaaatatgtattatagccgggcaaatcaggtacaaagtcagtccattcaacaccccaaaactcattaaacgatttggcagcatttgcagtaaccattccaacattctgatttgtagttttagcgcttattctgatcattttactgtttaatatattcccctgccgtgcatcgagcgcatacccttcttccgtcgtctcaaggttattcgcgatatttaccggcccggccggtccctgttcccccttatctcccttgtcaccttttggacctgtggcaccggtcggaccttgtggacctgtcagaccctgaggacccgtcaacccctgcgggcctatggcgccagttacaccttgtggccccaccggaccgggctctcctttgtcccccttatcgcctttcggaccggctgccggcactcctgtgtctttttcgccgacataccagttgccgttggtaccgatgtgcggtgtgataccgtcgtcacctcttgctttgactcccgtatcatagttgttgataaaccagttcccattttctccgatatagatttctggtatgaagcttgtattttcttccattttgtgttcctccttgacatttaatagtcgtatattaccagcaactgccgggacaaagagggacacgtattgagtttatttctccaaaatccattcgtcgtttgcgtattcatcaaatttattatcgcgaactcatatattttctaaattcattactattgtttttatccatatccttctattttgcaacaaaacgtttacaatatgcctgtaaggtcaaaaggagctaatatggacaaggccagaactttattacttaagctcgggatacgttctacactgaagggatttcacttcctgctgtatgcgatgcagctttgtttatcagacgacatgtacttgctgtccgtctataaacatctgtacgtagacgtagctgcacatttcggcacaaccagggataacgtagaccactgtatccgcactgctatttcaaactgctggtataaaggcaaccgggaactgtttatcagcattgccggttatgaacttaagcaaaaaccagcaaatggagaattcatagacattctctacaactacttatgccggaaaggataggcccgcactgcgggctctttccttttctccagtttagattcagccattttcaatatattcgttgccccaatctgtggcatctcctgtatctgtttgttcctgtactgctgcccctgccgcagacctgtggtaacatccgtgtttgccactgaattgccgatatcttttaatgttttaagtgctttgtcaaatgattctatttttattttccttctattttgttattcgcttctatgattactgattatttttttattcctttcatgttatatacgtattatgtctgtcagagtataataaaaagtagagaggagtgcctatgagaaataacattaatcacgctgacgattacattaaacttggactgaatattgcatattacaggaaacttggaggatttacacaacttcaactggcagaggcagtcaaaataagccgaacccatttaagtaatattgaagccccgaatatgccaacctctgtttccttagatactctgtttgaaattgctaaagtattggatatacctgtctgcatgttacttatgtttaaagaataaaaaactattgtcagcatcctatatgctggcaatagttgaaatgctatatattcatattgatgtttttaatataaatgactactacctcttttcggtcctctaatattatatagataatcaggtgatttttaattatcagtttcttatattctctattggcaaaagttcctgtaacgacttctgaacctctccatggcatgacagctagggagagatcccttgttcaagggcagaaataagattttctgctgtagtattatctaatgacctttgacagatattaaaataaatcaaatctaacatttttaatgcttccggcctgatggtaacaaggtacttatccaagatgtttcctcctcagtccgtcaagagcttcttgagcgttaagaaacttcgtgtcggatacaacttcgttctcaaatttcgtaatagaagtatcaatttcactctgcattgtcatggcattataagtttccatactcatcaaaaccatatcgccgtaaccattttttgtaatgaatataggttcatctgtattatggcaggtttcagatattttggtcgtatcacgtaattcctttattggtataattgttggcatgaatagcacctccttactttgtgtcataattacagcataattatgtactattttgcaattaaactattcgttttatctaatactagatatcaagagatttttttgacggccgccatatagcagtcatctgccggtatccgcatacttttataacgatttatctcatcgttcctgatccaatgatcttttatgtgcttcagatacccctggcatagaaaagggcacaactcctgcctcctgcagttgttgtgccgataaccgggttagctgcccatactcgggagccatacccagctgccaaggattcctttttccggtagcagccgtatggtagccgtaaattcccagttatttttattctctataccaatgcatctaaatactctgttactctttccaatatcaatcttgcagtttccacctgaattagcgcctgttctctggatgctatgtaaaaatcatcatagtcacttttttctcttaattgtttcaatgttgcaagttttcgccccaattctctttcaaaaattcctgctgcaacataatgctgattaaaatatgcaataacatctttatgccgtttaaagtccacagtgcctaaagcaagaaccgccttgactgcataaaacgcagaataataagagcggttaatagaatccttatataattcttctctcaaacaatgctctgctacacgaagactgtcctgcgcttctcttaatctatatctgcttaaatctttctgtctgtcatccatttattaaaatcccttctttcttcacattatcatagaatggcagtgcacccagccaatagttaaaatgttcttcattttttataattacactgatttccacaaaatatctcatctcataatcaaatgcaagatcaaaaactgttgtctctactttctctatctcggcttccgtaagcgtcgtcaaaatcataatatcaatatctgagtttactctttcctcaccgcgggcataagaaccatagagtataatctttgtaagtttatctcccagtattctcttaacatcctgtgagaagcccaagagaatgtcatgtatgctattcataaaatattcactcctttatttgcaagtctttccatgtccatattagtttcattcaacattttatactttcgtagtcccattataccatgcagataagcgattctcaatttcaaacttttggaacagcagccgaaggttagccacatactggcagccatatactttagaaaatttatttcctcttacatgcaccaacacttttacatggttctcacctgtcccggagtataaaaaaggcacaactcctgcctcctgcagttgttgtgccgataatcggggtaacaggattcgaacctgcgacctcacggcccccagccgtgcgctctaaccaaactgagccataccccgtcacttttatcattatactcgaatcttgtcgtattttgcaaccctttcgtctatttttgtacctcttttttcattatgctcagattatggaaaatcaaacccaaaaatacagcacattttacataactatgttaaaatgtatttattacagcatgcaataaattatacttatggaactgttcaggttcaataagatatgcgaaaggagtacgcattatgaaagttatcgtagtaggcccgagaggaaaaatgggaaaattgatcacacagattgccgcaggccgtgaagacatggaactgatcgccggtgtcgcgccaaagggcagggattacataggccgcgacctcgggcaggttgcaatgacaggctgtgacctgggagcgccggtcgtagatgatctggcctctgtaattgattcctgtgatgttatcatagacttttccacgaaagagatggccatggaggtactggatctggccattgcatctaaaaaggcgcttgtgtgcggcacaacaggctttaatgccgaagagatgcagcgttttaaggatgcgtcagcccatataccaatgctctacgccgccaatacttctaaactcgtcaatgttatgaataagcttctcgaagtggccgcggcagcgattggagaagaagctgatatcgaaattctcgaaatgcatgaccagtggaaaaaagacgccccgagcggcacttcaaaagaaatgggcgagatcatggcccgcaccatgggcagggagctggatgatatagcggtatatggccgtcacggcgtctctccgagagaaaacggtacgatcggttaccattctctgcgggcaggaaacataccgagcagccatactgttttctttggctttatgggcgaacgcctcgaaataacgcaccactcttataactgggaatgttttgcccgtggagcatgcgactgcgcggcatatttaagcgggaaacaagccggcttttacacgatcaaagatgttttaaatttatagctcacatagaatgataaatcacttgcaatatctgtttctaagaggtacaattgtattaatcaaataatacaatctattcttcaagggggtaacgacatgattttagtaaacacagattatataacaggtaagaaatttgaaatgattgggcttgtccggggtacaactatacagtctgtacatatgggcaaagatatcatgaacagtttcaaaacacttgtaggcggagaacttacttcctacacagagatgatgaacggagccagagctatttccacaaagagaatggcagatgatgcagaagctatgggtgcagatgcgatcatcaatatccgttacacttccagccaggtaatgcagggtgccgcagagataatggcttacggaaccgctgtaaaatttatcgattagaacaaagatttaaaagggacacactaaatatcaattggggacggaggtatttgaaaatacctccgtccccaattgcattcagcactatattctgtctttcaccaggctcatatctttctctgccatgcggatcagttccagccgtttgattctcagatccagatcatttccgatcagatattcatagaccctcttcggtacgagatgtgcccattcttcgtctgtagcgatacagcttcttatccacgacgccgtaacacccttctcttccggttccctgcgccagaggatctctgtctcaagtcccagactccgcaatattttgaacttctcctcatcccactcgtcacagatccccatataatacacagcgtcctgtggggcatactgcagtatatattcgggacggttgataggaaatggaataaactcatattccagatccggcacattaaactctcggagcgcgccgcggatcatctggcagcgttcgtaatatgtcagcggattggccgatctggcggaacggttttcatcatttaccgtttctctcacataagtattatccggattagtcagtccgatgtacagcttattacagcgcattttggccgcgagcagatactccatatgttttaggtggaatacctggaaccttccattgacaacccctgtctctatcatctgcatctcccctttttatcagcacgtattccatcatatctactcttttagtatactccgttattcccgtaaaatgcaagcgatgtacaagtttcgctatttccggtttgccggttccacttccaccggtttcccttttatctttgtgtggttgacagcacttaagacttcctttgcatattccctcgggacctcaacgaacgtatacttgtcatacatatcgatcgttccgactaccttaccgggcataccgctttctcctgctatcgcgccaagaatgtctcctggttttgccttgtgctttttgccgatattgataaacagacgcaccattcccggttcttctgcacctgtatcttcaaaattgtccacgtccgtttcttccgccgttccggtgcacatcttaagaagcgccgctgcgatatccatgctcgtataatccgtatcgttgatctcttcctgcacaagctggataaatgtcccgagatcttcctgctctatgatgcgggaagcctcttccatgactttttccatcttcgtgttggctacatcatccagagacggcactttctgcgcatatatctttgttttgcagtatcgctggatctccctgagcttatacacttctttacccgatacgaatgagaaagaacgtcccacgcggcccgcgcggccggttcttccgatacggtgcacatagtattcatcatcctgcggaaggtcatagttaaatactgcctccacttcgtctacatcaattcctcttgccgcaacgtccgttgccacaagaatatccgttttaccgcttcggaagccctgcataacgcggtcacgctgcgcctgcttcagatcaccgtgaagtccggcggcaaaatagcccctgccgagcagtccatttacaagaatatctacctgcttcttcgtattgcaaaatacgaccgagagctttggattataaatatccagaagtcttgacagcacttcttccttatttttcggctttacttcataatagaactgttcaatattaggaactgtcagttccttttttgtcacttttacaatttcagcatgtttctgaaacttctttgtgatatccaggatcggttttggcatcgttgccgaaaacagtacggtctggcgctcctgcggaacaccttccaaaatggtctcaatatcttcacgaaatcccatgttcagcatctcatccgcctcatcaaggactaccgtgtgcacatgctccatcttcactgtcttgcggcgcatatgatccatgacccgtcccggcgtaccaatcatgagctgcacaccactcttcagtgaacggatctgcttcacgatctcctgccctccgtatatcggaagcaccttgatgccgtgcatatattccgccagcgtacggatctcatccgccacctggatggcaagctctctcgtcggacaaaggacaactgcctggagtttcttattcttcgggtcgatcttttcaagcagcggtatgccaaaagccgctgtttttcctgttcctgtctgcgcctggccgatgatatccctgccctcgcgcacaagaggaatagcctttgcctggatcggcgaagcctcctcaaatcccatcttcttaactgccttcatgatctcagggcataattctaattcttcaaatctcactgtatccatctacaattcctttcatttttcaaaggggtcagacccctgctgcgtcaggggtctgacccctttggaaattctttaagttatctgataattcatggaacaaagcctcttatatcataaaaatactctttacctgttaaccaagtaaagagcattcacaaagtcccaaatgctataataacacatttatcttccatctgtctacagttttttctaaccgcataccaggacttcttatacttcgcctgtggccggaacctgacttaccgtattcttctcttccgtccgcaaggatgaatagagggcaactccgagtatgacgatcccgccggcgatctcccgcgctgtcggcatctctccaaggagtatgagcgcgtacaaaacgccatacaccgtctccatccctgagataattcccgctgtctgggcttttacccctttttgcgcggacacatacagagaataggcaaatgccgtacatatgattccgataaatgccacgccgaggatatctttaaactgccagctcactttgacccacgcaagtgccggaagcagaacgaccgcggccgtcccctgttcataaagacatatgatccggcccgcgtacctgccggaaaagtaccggttggccagcgtcatcactgcatatgtcacactgcacagcatcccccatataatgccgactgtcatatgattgtccaacgaaaattccggaatagtgatcaccacaccgatcagcagtataacagcctttataatatttcccgcgctgatcctttcacggaagacgagcggctccagaaatgtcagaaataacggaaatgtagaaaatgtgatcgtcccgatcgccaccgtagacacctggatcgactgaaaaaacgtagtccagtgcactgccataacgataccggtcagtatgatcagtatataatctttcctgcagttcagcctgagccgttcctttttcaccaaagcgatgacaagaagcagcagagaagagcttactacccttccaagagctaccatgatggccggaacatccacgaactgagcgatcacccccgacaccccgaataacattactgcaatatgcagacatatcacattctttttatttgtctctgtttttttactcttttcagttagatcccgttctctgctcatttctgcaccactccaaataatcgttttcttttactattctaataccaaaacacatatatttgcaatgtttttcacctgtaaatttgcatccggacaggatttctttttttatcgtgtaaaaatctccgcatcagccggctgtaatgtatccgttcacggattacagaaatcccgcgtcagcagcgtgtcatctctgagcagttcttctactgtttcaatgccaagttcttccagtatcttacgcacatacggattctcaagaggcgttttaaacggcgactcctgcccgtattcatctacaagctgcgtccctgtttctctgtcgaggatcgccttcggcccaccgacacatcctccgacgcagcccatcccttcaaaaaagttggcgtctgtctctttgtttttgattctctggatcatggccatacactctttcgtaccgttcgcctgttcaccgcgcaccgcaatgcctctgtccggccttaactgcaccaccatctcggacacggccctgctcaccccgccggtcctcgcatagaggcggccggccttagaggcatgttctttccggctgtcctcaaattcttccggacggatatccgccgccttaaagatatccagcacttcctggaacgtaagcacatgatccactgcgtcacagatatccggttccctggcctccttctttttcgccagacaaggcccggcaaatacagtgaccgcatccgggtgtattctcttgatcatccgcccgcaggccaccatcggcgacacggctcccggtacatggggcatcagttcatgatagatctttcgtatcatagcgatccatacaggacagcagcagcttgtgagctgatagtcgccctgctttttcacatgccggtcaaattccagcgcctccttcaaggtcagtatgtccgcaaacaaggcaacttccaccattccggtgaaccccagcgccttaaaagccatccgcagctgaccgggagaaataccgtctccaaactgcccgaggaacgccggcgcgaccatcatataggccggccccttggcctctctcacagccttcatggcagggagtacgtccctgcccgcgctcaggcgcttctcttcgcacgcatcaatgcatacaccgcatccggtacaaagagacgggttgatcctggcttttccgtccccgtcaatctcaatcgcgtcaaagatacagcttcgcagacatgcacggtcaaacgcacattccctgcactccttttcctgtactacaggcgcataccgctttggatgaagcaggcagtccagatgccgcgggtcatattctgacggcagaggctccttaagtgttatcttacgctcaagtacagcctggtaaagttcttcaaatgtcttcatagtctattcctctttcttttccggcagggcagtaaaaacacatgccttcacagacattatggaccaaaaaaggcattttcatccaccacgacggcacgttttcccaacgtgcgccaaatcatgcattcaccgcgggcagcagacacagcgcgcacaaaacgataccccggcagaggaaactgccggggtatctgtctatttctcatcgtacatcttaacttctaactcttttttttcaaaatcaataaataactggaacgcataaccgtcgtcactcgtatcccatatttccacatatttcggcgacacctctatgaggatctccgtatcttcatggctgtatttgttgtaactctgccagagatatttccggtagccctgcgcgaaccgctgtcccggctcctctgccacaagtcccttgttgacagccgttccttccacctgcactccgctccagcacatggccacattcggattctcaagcagctgttttgtcttgcggaaattcttatccgtcttaaaataaatcttttcgtcatagaacaggcagcttacatttctcaccatgacataatcgttcaggctggaggcaagcgccatgatctgactgttcccaagcatctcaaacatgcggctcaccgcctgctcgtacgtaatatctttgtccaatgtaaatttcatgacttctctcctttatttgtttatgaccccttttatcacacggctcagcctcttataaatgataaatgtaacaagagaggtgacgccgtacttgatcagattgaacggcagaatgccaaacactgccatcgtggccgcgtttttcaccgccgggttcaccgtactgcacatggctataatgtcgtccatggacatgccgaacagttttacataaaatggaatgatcagatacagatttgtaaatacagccacgaccgccacaagcagcgaactgaccgccatgcccgcgaccgccatcttcctggacttgttcctgtgatagagcagtaaggccggcagtacataagtacagctaagtatcagattctgcagttcacctgttccgagggaaaaactgccctgcatcacaagctgcagcatgatcttcacaataataatgcacagagcagccaccgggccgaacataaagccgcccagcatctccatcaggccggaaaaatcaaacgacaggaacggcggcataaaggggatcggaaatcggaacagcatcagcaccgcgctgaccgcccccatcagaccgataaaagctatcttctttaccctcatccgcgcgtcatcccgcgtctgtactttcccgcctccggttacattgatcgtctcatttgtctcgttcatactgaatcctcctcaaaaaaataacccggcacatcaaatacaatgtcccgggcgtgattacgcagaaaatgtcttttctcatccggactataccgtcggttctggaattccctttacgggtcaccagatcagccgctttacgcgggtcatggactataccatcggtagggacttgcaccctgccacaaagacttctttattcttttttgaataggtgattgcagtaacatcatctgctgtttcttattatatacctgtcttaagtacgtgtaaaccaaaattttacatttgccggatatctcagtcttcctgctccggggcaatcgcccatacccgcgccggaagacctgttgcgccttctataggcggaaatgccgcgataacgatggcgcccgccggaggcacctgatcaaggttgcacaggacttccacctgcagcttcccgctgccaagcacatacctctcacacgcaaggtctccggcccgctccgcaagcgccgaagcgtccgtatccagcgtctcatggccgttcgccgccgcattccgctcctcatagatatatttcagcgcctccatcgaccatccgggggtatgttctcccccatccttgtcaaaattacagaccgcatccatggacggccagcgttttccccagtctgtgcggagcgcgacaaaagcgccgtccggaatgtctccatactgctcttcatacgccttgatatcctccacggtgaccgcatagtgcacatcttccttaaccttatccgagatatcgatcacgacaagcggatataccatatctctgacgccatacttctcagacagctctctcccttttacaaaatgtccgggaaaatcgatatgagttccaaactgtcccgggaatttaaatgtctggatgagacaatccagcatatcattgccccagtcaaaaacagtcctggacagatccaccgctccgtccggaataccgccccaatacgggctttcattgttcagcggatgagacagctcgatccaccggcagcgtttcagccgctccaggtccttccacaattgatacatcttaacgcacctcctttactatgcattataacctgattatgaaggtgcggcaagacgcccggcaacaatattgaacagagaaaccttccttatacgattctcgtcatgggcagttcattattgatcccgttcgtcatgactatctggtgcagatctataatgccgttgtggaacgtcgcggcgcaggaagccagatacaattcccacatgcgcataaattctctcccgtacttctccgttatctcttctctgtgcctgagcaggttctcccgccagcagagcagtgtctttgtataatgacgtctcagactctccacatccgtcgcatacagctttctgtcgcccatcagatggatgatctcccgcagactcggtatgacgccgcccgggaaaatgtatttcttgatgaacgcatctcccggaaattcctgaagcgcgctgatataatgcagcagaaacaggccgcccggcttcaggaccgactgcacgcattcgagaaacagcggataattgcctctgcccacatgctccagcataccgacactcaccactctgtcaaacgaaagccccgatgccttcagttcacggtaatccataagacgcacgtccagccggtccccgagtccctcctcctcaatatccttacggaacttggcgtactgctcccggctcaacgtgattccgattcctttcactccgtaatttttcaccgcgtgtttcaggagaaatccccagccgcatccgatatcgagcacggtcattccctcttccagatacatcttatccagaatatgctccaccttattgacctgcgcctcatagagcgtatcagactcttccttaaagtaaccgcaggaatagctcatcgtttcatccagccagagcctgtaaaagtcatttccgatatcatagtgggacgtcacctctttttcctggctgcggatgttctttgacgtatataaaatacggcgcagcgctccccggtttacacggaactttcccatttccccgagaaaactgtcaagcacctcaaacaaatccttatccacatcaatatcttcccgcatatacgcctcgccgagggcaagcgacgtactgttaaggagcgcccgctttggaatatcacgattgatctttacggtaaactcagggacagcgtccccgatcgtgataaattcttccgccgtctccagattaaaactgaccggtatgatcttctgcaagtattctgtaaaaaattcattcataattctctcctttgccagaccgaatatacttttggattatttccagttcttccagaaaaatacacaatacgattgacatgcagctatcttgtgatacaatatagttaagaacattgtaatgcaaggtagatgaaaggaagtggcggaaatggacaaatcccagcttatgaaaggtatactggaaggctgtatcctgaagatcatcgaccagtctgagacctatggatacgaaattgtcgtcaagctgcaggaaaatggattccaggatgtaaaagaaggcactctgtatccgcttcttctgcggctggaaaagaaaaagctgatcctggcctcctacaagccaagcccccttggcccgagcaggaaatattactccctcacccgggacggccgggaatatcttgacagcttctacgttaactggcaggaaacctgcctttctgtgaaacgaatttttaaggaggataaagtatgaatccattcagaaacgaactgaagaagttagacagagaaaacgatgaacagtctgcctatatagaatgcagggataattacgtggcggtccagaacatggtccgttacctttcctcctcttccctgtcccttttccaggtacagatcatacggaaagacttgatcggcatggcggttgagggtgaaaaggaaggacttaccgtccgggaaaagctcggcgtggaaccgaaagaattctgcgatgatatcattcagagcggggacaataacgcgcgccgcgagcatctgctcaatgccgttgtaaataccgcccagtttgccgccttctggtttacgttccggttcctcggcttttacgcaaaccccgccagctacacactcacatggggagacattctgaccatctttttgtattattttataggcgtctttctggcgacatacatccgcaacaggctgtccatctgctccagtcctgtgctgcgctggcttccgtatctaacgatctttttcgtcgtcatatgcggttatacactgtcaatgaagttttacactccgatcaatgagtcgttcatcatcatgataaacggctggtatgtcgaatgcgcggccgtagcgctggctctcgctgtcactttgctcgccaacatgcactggcgccggtgcgcccggaaatatgcgtgctgactgtcaaacgtcattcttttttcatcttccggccggatctgtgatatactgttttaaaacagtataaatggaaaggaaaggatggttctatgctgaaacaacaagaagatattaagttattgaaagaaacactgactttctggaaccagcttaccgatatacagcagaaaatgctcattgaaagcgccgtgtccagttcatacccaaagggtaaaatactccacagcgccgactacgagtgcatcggaacactcatcgtcaaatccggctctttgagagtctacatactttctgaggacggaagggagataaccctgtaccggataaacgacggcgagatctgcgtactgtccgcatcgtgcgttctgcagtccatcacctttgatgtctacatcgacgtcgtatctgactgtgaactgatacagctttgctccaaaacgttctcagctatcatcgaaggcaacatatatgcggaggcattcacatacaagctcacgacggaacgtttctcggacgtcatgtgggccatgcagcagatactgttcatgagctttgacaaaaggcttgccatatttctgctcgatgaggcggcgtctcttcactccgatgagatccggctgactcacgaacagatcgccagactcatgggaagcgccagagaagtcgtgacccgtatgctgaaatacttttcctccgaaggatatgtggagctttccaggggaacggtcaggatcaccgacaaaaacagactcaaagctctcgtctgacagcaaagatacaagaaagcctgccggcttttacataccggcaggctttcttctctgcatttcactctgtccatacggactagctgttatatatctctttattcagttctttctcttttgcgttcacgatcacatttgttgcggcatcgccgataacgttcagcggaagcagcgccatctcgaccggacggttgatggcgaccacaagcgcataaccgatgaggcaggcttcggtcgtccagcccattcccgacaacacagtaaatatcatcgtcgtacctgcgatcggtatggccggcgtccccgccgccgcgcagatagataaaaatgccatgacgataagattggccggcgttacgtctattcccgcggaggtggcgatgaaagtgaccgcgaacatgtgcatgaccgtcgttccgttcatgttgatcgtcataccggtcggaagcacaaagcttgtaacttcctcactgcatccaagctcgtctatacacgtcctcgtgttcaatggaagacatgcagccgaagaattggtcgagaatccgaacacacccacttttgcgatcttctttaaaaatttgaacggattcatctttgtcgccagatagatgcctgtgggatagagtatgacaacgagcaggaacagtgtcagcattgccgatacaacgtaagctgctgccggcgcaaggtattcaacaccgtagatcgcgaatgttctggatatgagacagaagatcgccaccggacctaccttgttgataaggaatgtcagatacatctggatcacttcattcgcactttccagcacctttttaagaggcgacgccttgtctccaagcttgttcatgcacaggccgatgatgatcgccacgacaacgaccgccagaatactgttgttcgtgctgaacgcctccgtaatgttggaaggcaccgcattgacaatgaccgccagcggattaaaagcgtcgatggtagacgcctcggtgaccgcttcgctcggaagcgtgacgttaaagaaaccgagcgtctttacggcataggccacgacacatccgagaaaagcgccgcacacgtaaaagctgaaaaatccggccagcgtacgtcccgcgatccggccaagctttgtagaatttgaaatgctgcacatggcaaggctcaaagacacaagcacaagcggtacgatcgcaagctgcagacccctcataaatatctgccctacgatatagaagataccaactgctccgacaccgtcctccaccgtgatatcctggaagaggatcttgttgatgacattccatgcggcttcattcccggaagaggtaagctgctggcggatcagcagaaaaccgataccgacgaccagacctccggcaagggcaatcatcattttctttactactgacataggttccttttttgtcgcttctttactcatctttttctttcactcctttatcattttcatctgtttttttcggaaaaaaggttgaaaaaagcaccggaataaatcaacgctgatttttccacatctttcttttcattgatttacccctggtgcgttacactatcgctgcagatttctgatctctatcccctcatcagcaaaggtctcccggatcctccgtacaaatgccagcgccttcggcccgtcgccgtgtacgcagagcgtatctcccctgatatccagttccttaccgtttatggaagtcacttttccttccttgatcatcctcacacaccgctttatagccacttcttcatcggtgatcatggaaccctccatctttctcggcacgagtgaaaggtcgtccatgtacgcgcggtccgcaaagatctctgatgcggcgcgcagtcctctgctctctgctatctgaccgagcaccgcgcctgcacagtaatagatgataaggtctttgtcgaattccgctgccgcttccactatcgccgtggatatttcttcatcatactgacactgattccccatcgctccgtgaggagccacatgctgcagcttcatgccattgctctgtgtgaacgcagacaacgcgcctatctgatacttcacatagttttttacttcctgaaaggacagcgccatctttctgcggccgaaccccatcagatccgggtatcccggatgggcgcctaccgccgcgccctgttcctttgccaggcgcacgacctgatccatgaccatcgggtcgcccgcatgccacccgcaggcgacattggctgtcgtcacgtaccggatgatctcctcatcgccgccaagtctgtatgctccaaagctttcacccatatcactgttcaaatccacactgtacatttttctgactcctttcctgcccgcagcggttttccctatacctctttacttatttacgacattctgcggcgctcccgccacaaaacatcggagattttccaccgcaatgtccataagcctctggcgcgattctttcggcgcccacgcgatgtggggcgtaaggatcacatttttggcgtccagaagcggattgtccatgcggatcggctctgtagatacgacatccagcgccgctcccgccacttttccgctgttcagcgcatcccgcagatcctcctccacaatgagcggacctctcgaatcattgatgatcataactcccgtcttcatcctcgagatggtgtccttattgatgatcccttccgtatccgggaacagcggacagtgcagcgagatgacatctgactcggcaaggagcgtatccaggtccgcgtaacggcatgtgtcactttctaattccggctttttatatgcatcgtatgccagaactttcattccgagcgcctgtgcgatctttcctgtatcctgtccgatcctcccaaacccgatgactcccatcgtctttcccgccagctcaacgagcgggtatttccagaaacaccagtcagggttactcgtccattctccatttttcaccgcgtcggagtgctctccaatgtgatggcacagttccagaagcagcgcgatcgcaaattgggacactgccgcagtcccatatgtaggaatattggataccggaattttcttctcctttgccgcctctatgtctacaatattatatccggtcgcaagcacgccgataaaacggatcccgccgcatttatccagcgtctcccgcgtgatcggcgtcttgttcgtatatacaacatcggcgtccccgatcctctccgccacttcctccgcccgggtgcggtcgtagactgtaacgtctccgagcgcttccataccttcccagctgatatcaccgggatttaacgtataaccatccaatactacgatcttcatattcatttcctccatcttttccttttgttttcatacttccatgtactgccttcaacggcccagctgcttctccagacgttccagactcttaagccgccttacatacaagttctgcgccagttctatgccgacccttacaaaacggacccgcatgcccggaacactctgtgtcagttttggcagatcgacggatatgactgtgcctatcttgctgtaaccgccagtgctctgtctgtccgccagcataatgatcggctgtccgttggacggcacctgaatggaaccaaatgcgattccatctgttatgatgttcccgtcgccgatatgcttcagtggctcttctctttcgagcctgcagcccatacggtcaaattcattcgttatctttgcgctgtaccagaagaaacgcttcagttcctcctctgaaaagtccgtatcctgcgggccggccactacccggagagtcaattcgccggtcggaaatctctccggcgccagcctacgcagcggcatattcggaagctctgtcttagggcttgcaaagccgatggcatctcccttttccagtttccttccctcaataccacccagtttattgcgcatgagagtcgctttgctccccatcacaaggggaatatccagcccgccggcaaatgccagatatcctctgcttccgctgccgtccgtcatcccgaaagaaagcgtatcccccgctctcactaaaactgcctgatacataggcaccggttccccgttcacgcacggagacatagatgctccggtcaccgctataatattgtctttttggaacttaagcgtggggcctgaaaaagtcatctcaagcagtccttcactccttctgttccccgccaggatattggccagataaaaggactgcgtgtccatcggtccggccggtgacacgccgaactgctggtacccgaatctcccttcgtcctgcactgtggtcagtatccccgggttctcaacgataatgtccattatttcaccgccttttcatatgttttcagacgatatgttcctcttcttacatcttctttgatcttctcatattcccgcctgcctaccggcacatatctcacccattcccccgcatgtacgaggaacggatctttcttcgtatgatcacagatggtaagcggtgtggcgcctacgatattccatccgcacggctggtcaaacggaatgagattggacaggttaagctgtacgacgacggactgtcccggtatcctcaccctcggcgtctccctccttttaaaatgaaacggttcttcaaatctggccatatacgcgtgtccgggagcaaatccgagcatataagtataatactcatgttccgaatgcatacggataaactcttttgacgacacgttctcaacagccgcacagtcttcaagatccggtcccagttctcctccgtagcagatcgggatctctttcacgatacgggatccttcttccacctgctccatgctcccaagccggccttcaatctcctctctcagccggctgtactgtatcttttccggcctataatgtatcatcaatgaagcataggtcgggaccatctcgacgatcccctcgacaggatcgttcgtaaggtccatgaaaagcatgcgcacgagctgattcacttccaggcttatctcactgcccatctgtacggaaacagccgagtcacctgatataagaaattttgcctccatccggtgtcctccttttattttgtggattattactatattgtccgccttttttcgttcatttttatggattggttacagtatagcacacgaatattatttaaaaaaataaattatttaactataatatattaactttttctattattggccggcagaatcccagcccttctccctcaggtatccgtccagcctgtcctcaaacacctgcacggctttcaatgtcgcctcattcggaaatttgtgctttatcttatatgtgatcctctccggaggctggatctggttgccgatctcacttacatatacaggccgcagactgcggatacgttccaccacagagaccggtgcgatcgcccacatctgttccttggacaggagatggaacaacagctcaaacgtatcgacctggatgcgcggacgctctcctctggacacccactggtcatgccagatctggtaatttgcctcccagcttacatatatctcccgccccagatcgagctcatcggtatggatgaccggtttcctgagccgagtctcatctgcctgtataagatacatcttctcctttaacactggttccgccacaatatttttaaaatgcagatggtggtatacaaacccgaggtcaatatcgtgattttccagaagtccgtatacctcataagagtaatgtgtcttaatgtgcagattcattatcatctcttcttcatccagcatatcccggtaaaggtcaaataatatggcactgttcagcgtatctgtacaggctaccgtcaggttcagcttctcctggctgtctttcagccgctgcatttcctgccagatcgacacccaccgctcggcgatcgggataaactcctcaccctgtgccgtaagttcgatctgcttgtagcccttctttctcgttatgagctttacttccagttcatcttccagcgatttcagcctgtggcttaccgtaggctgcgacaggaacagattttccgccgtctttgtaatattctttgtctttacgatcattaagaaagtttcgatctctgacagattcatatatttcctccttttatctacccgtttccatgcatccgttaaatataaattttattaatattatacaatgaaattattcatttctcaatttttatcgttcatgctatgatgaattaaaagatcaagaaaacgtccagataaggaggatgaaagatgaacactgaacatggaattttattttctgacgcgtatcagaaaagtttaaaagaacaattttatcatgcagatgaagacccggagcacggcgcccgcctcttttttgagaactccggcggctctctgagactgaagaaggctgtggaagttaaatgcgccgtagaacagtttccggactgcccggaacgtgtgcgcgggagaggactggaattacagtcctatgtaaaaaacggaacaaaggagatccttgaagttgtattcggcgcaaaaagcggcgcgctgctgacagagctgtcagcttcccaggcaatgtaccaggcggtcggcgctgtcatggaaaatgtgaaatggggaaccaatgcggtcacctcctcgctggagcatccgtccgcgcatgatgccgtggaatactactgtaataaaacaggaagagaattccgcgtagtccccgccaacaagacgaccggaggcattgacccggatgaagtgatgaagtacgtagataaagatacatgtctgctgagcattatggccgcctccaacatctccggaaacattatggatatcaaagagatcacccggcgcgccagagagatcaatcctgacatctatgtagtgagcgacgctgtacagcacgcgccccacgcggttatcgacgtggaagactggggtgtggatatcgcgaactttgcgccttacaagttcttcggcatccgcggatgcggttacgcatatgtatcagaccgggtagctgtaatgccgcaccacaaattaatacataaagaggccgatgtctggtcgcttggaacacccactccggctaacttcgccgcaatgatggccgtcatcgactatgtatgctccatcggctcgcatttctgcgacgccgcggacagacgggcgctgtatgtggagggtatgaaccggatccatctgcaggagagagcgctgctttaccgtatgctggaaggaacgaaagaagttcccggactgcgtcatattaaaaatgttgaagtgtatgtggatatggaagacctgacatataaagatctgatcattgccatggggatccggggaattgaatattccgaatgtgtccagaaatatctggagcatggcgtcaccgtgtttgagcgcctgagaagcagcatgtactctaaaagaattgtagaagcgctcggtatcgaaggagccatccgcgtatccccgctgcactgcaacagcgccgatgacatcgacagattcctgaaaataacagcaaagatcgccgaaagcgtttcctgacggccgcgcatatgtgatatgcttgatatatcaacaaccaaaaggagcataaaaaaatgaaagttgtaattgctgtggactcattcaaggggagcctgtcttccatggaagccggacgcgccgcgaaagcaggcattcttgccgccaggccggatgcctctgtcatcgtgaaacctctggcggacggcggagaggggacaacggacgctcttgtagaaggcctgaacgggaaaaaaattgacatcactgtcaccggccctttgggacagccggtgtctgccagttacggatatctggaagaaacttccaccgctgtgatcgaaatggccgcagcggcaggtatcactttagtccctccggatgcgaaagatccgctttcggccagcacatacggcgtcggggaaatgatcagcgacgccctcgggcgggggtgccgcaacttcatcatcggcattggcggcagcgccacgaacgacggcggaatcggcatgttaaaagcgctcggctaccgcttcctggacagagacggcaaagatgccggggaaggagcggccgccctcggacgtgtaatgtctgttgatacggacgggcggaatcctctgttgtccgaatgctgctttcaggcagcctgcgatgtgacaaacccgctctgcggaaagaacggcgctacgtatatctatggcccccagaagggtgtgacgccggacatgctggaaacgcttgacgcacatatggctcactttgccgcagtcacgtcccggacattcggcgccgaccacagcggcgcgcccggcgccggagctgccggcggactcggctttgcccttctcagttatctggacgcttctctcacaccgggcatcgacctgatccttgaagcggtggatctcgaatcagagcttgccggcgccgatatcgtcgtcaccggcgaaggctgtctcgatgcccagaccgccatgggaaaagcccctgcaggcgtggcaaggcttgcgaaaaagtacggtataaaagtcatcgcgttcgccggaagtgtgacaaaggaagcatcggcctgcaaccaggccggcatcgacggcttctttcccatcgtgcgcggcgtcacaacgctggaggaagccatgaagccagaaacggcacgggataatatggctgcagcggcggagcaggtattccggatcatagacaaataaaaaaggcctctgtcttgtgatatgtacccagaaatctggacacattacttgacagaggtctttttatctgttttctacacttccagcatagccttcagttcttcttttgactttgcgccaacttctgattttactttctgcccgtccttgaataccataagtgtcggtatggacatgacacggaattctttcgccagctccatctgttcatctacattgaccttgcagatcttcgcgtccttcacttcaccggccagctcctcaacgatcggcaggaccatctgacacggtccgcaccactctgcccaaaagtctacgagtaccggaacctctgattccagaacctcctgtttaaaattgtccttcgttaaatgtattgctgccatatgattacttcctttctatcattaatcttattttgttttgatgttgtctctattatacaccatttaagaatcatttctgtgatttggtcacaattatttcttcgtaaaacttattggcgcacccgatcacttcttccgggaaaccgatctgctcaagaagtcttatggcgttcgtatttttattgacccctctgtgaatcttatagtcaaatataacatcctccgcctccggctgctcactgaaataatagaagtcataactgctccctctcagcatttccagaagctccaggtcgtgtgtggccacgagtacgatacagttcttatcctgcagatacgagagaatcgccgcagacgcggccagccgttcgtccgtgtttgtcccgcggaggatctcgtcaatggcacagaatacaggcaggcgtccgtccacgctgaaagccgttctcttcagagacttgatctcgcggatataataactctcccctcccatcaggttgtccctcactgccatggacgatttgacatacgtggccggaagcgtaaaactccgggccgtacacgtatgtatcgtctgggccaatatctcattgacggcggcggccttgataaacgtcgatttaccggacgcattggagcctgtgatgaccgtatttttattcagcctgacactgttgtacacaggatggccgatcaggggatgatatacatcctccatctcaacagacagttccctgtggaatccgggcacgcaaaagacggggagactttttctgaatgatgcgacgcacagaagcatatccagttccccgatcagttcatacagccagataaacgtatccatctttgcgcatatctcccggatgatcttgttatacacggtaaagtcaagaagaaacgcgcccgtgatatatgcggctgccatctccataaagtcgccggatgccgacgtccgctttctgccgagcagatatacaaactttttctccgaatgcttcagttctccggccacgcggaaaagttccggagatacctgagcgaaccgcccctgcctgctgtccgttatcttctgtgcggccctcatcaggccgtagataccttctatcacttccagctgcgtgtcatatttccccttcattgtaccgtaaacggcaaggttcacgagaaacacaacacccgcggccgcaaatatccattccgtgcgcagaatgaagcagagcagcaggctcaccagaaaggccgcctgcatgatcctgtagcaccagacatggcgcatcccgaatgcatccacattattaaaaaaggaaggcacataataaaaacttggccgctttccgatcttgtggagttcatactggatctcggcccgttcctcctgctcagcctcaaaaaaagcgatcttctgctcatactgtgcaaaacgttctttgtcctgtgacaagatcctgagtgctgcgtacagatactgctccccggcaaaagagcaggccgaattgatccgccaaaacacctcctccatatcgaggtcgttccacgtctcatcatcgacaagcccattctcatcactatgctctgcctccgcataatacatgccggccagtttcagatccagctctcttttctccggcttttttccgtactgatcccggataaagtcccgcagtcttttccgagctgcatatcttgaacagaccgctatgacgatcactgaaactgcagctcctgcaataagtgcagcggtatacacatccataacatgcctctccttttcatcatgcatttgtgttattgtattaaccttttaatacagaataccactgcccgagaagaaagtcaacggcgccagagcggaagccttacttttatcctggcacctcccgtcaccttgcagtttccggtctccataactcccccctgctgccggataaaacgatccgcaatgtagagccccataccgtaatgaccttttttatgcctgctcatatctccctggaaaaactgttcggaggcagctttcagctccttccctgtgaagccgggcccgctgtcgcagacaatggtttctacatacgcctgcccggccccggtctttacagctgcctctatggtgataacaccgccttttggagtgtactctgccgcattggacaggatattcataaatgcgcggtacagcttttcctcctgtacacggatgtctgccccctccgtatgtatggaagctttgacttgtatcttctttccctttccgagatgctccgcctttttaacgatctggcgcagaaatgcctccgctttcagcactttctcctcctcccggccgctgtttcccgttctaagtgtatcctgaagaatgatcagataatcttctatctccttcacgctctctgtcacataccggttatattcccttacatccccgtcacgggctgtctcatggatcagttccgcattgcccctgatgaccgttaacggagtctttatgtcatgtgcaagcgcggatatctgttcctttttcagctcctctgacttccattgctcctcaagcgatgtcttcagcgcctccttcatcgtaaacaaagatcccagtacatcatcgatctctctgacgtccgagtattcccggtcaaactccaggttattcttgcgtatcctgtccgtcacctcattcagcgtcctgatccgtccggacagatatttgccgaatttgcgcgccgtccaagccgtctgcagcagaaacaaagccagtatgaccgcgcagaacagccactctgcattcggcagatacttccggagggaaggatccgcgaactgggcaagtatgtcatagcgcacgatgcacgtctctttgtcctccctctctataaacttgtaaaatgtcttgaatgctttctgcgtctccccgttctctttacagctccacgccgttccctgctctttcttctcaaaattaccgtacagataatttccggcttcgtcataaacgccgtacgcggcgccgtcaggtatcatgctctccccgacgcgtccggctgtctcaatgtcctttgcgccctcctccagcctgttcagggtatacacggccggctgcagaaatcccgtgttgatcattatattcagcgcgatataagccgcggcggccagaagcgcggactgcgcgagaaaagccccgagataagtgagaaataccgtatatattttcttctttctttttatttccatcggtaccctatcccccacacggtttcgatcggggaaataccggccggctggcatttcgcccggatgtttttgatatgctccgtgatcgctgtgctgtcgctctccttctcatacccgaagatatgttcatagatgcgctcttttgaaaacacctgcccttgatggagcgccagatattcgcagatcgcgtactcgctcttcgtaaacggtatctcctgcccgccgcacagcgctttcttttcccccggcagaaactgcatgtctccaacggtcataagatgccgcctcttccggctctcccgcctcagatgggcctgcaccctcgcgcgcagttccccgatgccgaacggcttggtaatgtaatcatccgccccgaggccgagtcctttcgtgatatccccttctccagtcttcgccgtaagaaaaaggatcggacagtctgtaccgcttcgtatctcttcacacagtgcatagccgtccaggcccggcatcatcacgtcaagcaggatcaggctgtacggtgacaggtcaaggtgcagaacctcctccggcaccgccaccgtatctaccatatatccgtccttttccagggcgttccttataagcatgagtatatttctttcatcatctactgcaagaatacgttctcccactattcctcacactgccttccttcataatagtgaaaccagataaagatcccggctgtaataagtaccgccgccgctgcgcataccgccagctgtgccggcagtgaccgcgccgccgcactccaccttccccggtcccctgcctcatataataacagataactgctccatctgccactccacgcgcacgggaccacaggccagcacccgtccccaagaccggtcagcataagcgcggccaggaccgcttctacgataccggcagccatagacgccgccttcccgaagcaaagactcaaaaacagatggaaggcatacagcaccatctgtcctccccagagcgcgagccagcccagtatatagaagtgcgccggatacgggttctgtcttaatatgaactcatatcctgccgcgaacccaggaaaagcgatggccgatgccgcgagggaacagaggccaagcgccagccatttcccgagaaacagacggtactttctccggcctgacagaagaaaggtctgcatatgcccctcttcttccagttccacagacatggcgcagacgagtcccgccagaaacggataagccaccgccacagactccatatatccctgcactttgccttccgcgctccacggggcatgtccataataaaggagaaagaccgccgcgcctgccgccggcacaaaaatgtgcatccacagcagcttcgtatgccgcatcttgataaattctccctgtataagccgcgtcagttctctcataccgtctctcctccttttttcccgtaccacattctgaaggccgcccacaggatgacgagccagagaaggcacacgcacattccgatcggcactgccttcatatccataagctccggcgagtatgtcacgttcccttccgccgccacaagcccgttcggcaatactttgatcagcgggcacatcgctctcgccgtcacggaatacgggttgatataccagtgttctccaagcgggcccgtcactgtgccggccacattcagcgcaagattggcgaacagcgccggataaagtccgaatttttcattcgcccacagacagatcggaatctgccatatgcatcctccgatcataacgagtgcggcgagagcgccctgacgcagcgtgacttctgccagcatctccatgtcagccacagactccgtcagaagccgagccgctgaaacgaatgcgaatagcacaagatttccaaggactgccgcttttatgcagacgagcactttcgcgtcccacacacgcctcagatcgaccggcagtacggtcaaagcgcggccttcaagcttcgtgtccgcctgtccggtcatacagcatacaatggtcagcatcccgggaagcagcgatgtataccaccagttataaccgtcgatggcgccgtaacttccggtcagcagaaaggcagccgccaccgtgagcgccggcatgatataacacagttttgaaaagagcgtatgcctgcacttcagctgctccgctgcataataggtccggaaaaatgcactcattttaccacgcctccttccggcctctgcccacagtcttcataaaggtctcctccagccgcccccgtttcggcatacctccctggaatccaagcacgccgtccgccagaatgcctatatagtccgccgtctgctctacttcgctcagtatatggctggagaggatgaccgtgatcccctgctgtgcaaaggagcgtatcatctcccgcagttgttgtatgccgtacgggtcaagaccgttggcaggctcatccagtacgagcagccggggactgccaagaagcgcagccgctataccgagacgctgtttcatcccaagtgaaaagtgccgggctttttttcggcctgtatccttcaggtccacgctaaagagcacttcctctatcctttcctccgaaatcccgagtatctttgtgcgcacgagcagattttctctcgccgacaagttcccatacagcggcggcgtctcgatgagcgcccccatatccttcagattctccctgctccacgtctttccgccaaacagtatctccccggagtccgggcgcatcattccggtgagcatctttaaaatggtggacttccccgccccattcggcccgagcagcccgtagacgcatccttccggcacctgaagcgacacgtgggacaccgccggatgccctttaaaagacttacacagatctctcgtctccagtaacaatcgttccattttacatatcctccttacaactataaaataaattataattctaaggattttataaggattacataaaaatgatcagggacacagccatcaggcagggctgtgtccctgatcttacttccccagaaggcagacggcccggccctgtttggcgtcgagcataagctctgcatggcagtctgatacatcgtacagttttattatctcgttcagttcgctgtcgtttggccacagctcctgaaaaatgtccctgtgctgtgtaagaagcccgggctggtaacatcttgtcttactgttgtcgttgatggcgccgtagtatacgtcggcctccaccaggtcctggaacatgtggcttccgtaggacagttcaggatggtatccgacctcactgtatgccacttcgcatatggcgcagaattcactgatattggcatagacgaccggcaccccaagctccggggacgaggtgccgatgcgccccggcacgagcagaagcatcttcttctccgcctcctcaaaatgctggttgatctcatcgatcctgcgggctacgctgaacttctttgcatacggatattcataatatttccgcggatctacccatacgataagatccagcttctctgtcttggagcggcgcatggatgtcctgcgcacgtcaaacaagaattcgtccgccttgtcctccggtatatgtatctcctccgaaacgcttgcctgaagaggcctgcactggagcaggttcactttccattcgtcttttgcaaagctgttgacggcaaactccacatccaccggcctgccgtactccgcctccagcatctcaagtatgtgcttcatcagtccgataaacccgtcgttgttcaccatgccctggcagtccgcaaaatacactttcttgtaaacgccccgctgcgccagcatatcctccgcgtccgtgtcgtggctgagcacgagcttcttctgccagcccggcagcgcttcgatgacttcctccagccgccgtgtgccaagcgtgcccgtctcgtgatccatcacatctaccttccgctgtgaatatttatgccgctccgccacggtcgtcctcaagttcgcctgcgcccggtccagacacacgagcctcggatagtcgccgggcgttcgctccacagctcttgtcccgagccccatgaccatacggagcatgcccgcgtcgggattcatattctccatccatttgtacggattgtaagaacaccccatgccggcagccaccggcatatagaatccgtcgtatttctgcccttctaccttctggataagaagcgccatctgctcatccgtatccagcagcttccttcttctcctgtactcgatggcagacggattcatcgtgctggcatacacgcttcgtatggcgtccgtcagttctttgagacgctccgtttcgctgccctggttcatacagaaggtagattcatatttacccgaaaacgcatttccgaacccgtcttcaagaaagctgctggagcggacgatgatcggggtgtccccgtaatgcctgacaacttttctcagctcctcctgcacttcctgcgaaaatgtccctccgcttatgcgcccgcgcagctcatccgcctctttaaacttctccttctcctccatgtggcgccgccgcagttccatgcagtcattgtccaccagatactgatagaacacgtccgagccgacgaagaaggaatcgtggggcgcaatatgctccacatactgcggtgtcttcacctcgatcagcttccgggcgagcagcaggccgcacgccttgcctccgatccttccgccgccgatgctgcgctccttcacgcggacgtaatcttccggcgtaaaatgttccacgatgagccgctccatccgtatgtccgtcgtcatcaattcattgcatatatatttgctctccttagccgtaaggctctctctatttctgatctcctcccagttcaccgtacatgcctccctttctcctggacataccgtaatatgaaacgatctgtcaagatagccaaatgtctatacttcttatataaatataagtatttgcttctatcataacattttacatataattaaggcaagaaaacaaggaccgctaaggaggaaagtatatgaacgatacacagaaacccaacacatccctgcaggagttaaaggaccagtacgaagccgccaggggaaaacatttaaaactgaatatgtcacggggaaagccgtcccccggccagctcgacctgagcaatgaactgctcggtccgctggattccttcctgaccgaggatggaacagacgcaagaaactacggtatcctggatgggatcccggaatgcaggacactgttcgccgacctgctcggactggaccgcgacagaatgataatcggagggaattcaagcttaagcctcatgtttgacactgtggccgcgttgtgtctcttcggcacaggcggcaaccgcccgtggcagcattacaaatacgccgggaccccggtcaagttcctctgtccgtccccggggtacgaccgccacttcaggatctgtgaagaactcggcattgagatgatcccggtaccgctaagcagcgaaggcccggacatggatcttgtgaccgaccttgtcagacaggaccctctcatcaaaggaatgtggtgcgtaccgctccactccaacccggagggcgtctgctacagcgaccgtgtggtggagcagcttgcctccatggaaacggcggcgcgtgacttccgtatcttctgggataacgcttacgggatccatcacatatatgaagaagtaacgctcatgaatattctggatgcttgtgaaaagcacggccatccggagcgggcttattacttcttctccacgtccaagataacgttccccggcgccggcgtcgcgctcatcgcctccggcccggacaatataagggagctgaaaggacacatgtccgcgcagatcataagctacgacaagctgaaccagctgcgccacgtaaaatactttaaaacgccggacaacatccgggcacatatggcccgcctggcagacgagctccggcccaaattcgacctggtactctccaaattggaagcagaacttcgcggtaccggcctcgcttcctggagccatccaaagggaggatatttcatctctttgaacacgctgcccggatgcgcaaaaaggacggtggaactggccggagaagccggcgtcgtgctgacggacgcgggggcgacttacccatacggaagggatgaaagcgacagcaacatccgcatcgctccgtcctatccgtcactcggggaactggacgcggcaatggatatctttatcttatgtattaaaatcgcggcactggaaacgaataaaaaataaatcaaataaaaaaggagaacgaaaaattatgaacaacacatacaatccatacgacaacgtattaaaggtagtatcagaagcagctaatatcctcggctatacggacagtgatatcgaggcgctcaaatatccggagagagaactgaaagtagccatcccggtcagaatggacgacggcagcacaaaagtatttgaaggctaccgtatccagcactccacatcgagaggacctgccaagggcgggatccgtttccatccggatgtcaatctggacgaagtgaaagcgctcgctgcctggatgaccttcaagtgcgcggtcgtaaatattccgtatggcggcggcaaaggaggcgtcgtgtgcgacccgaacaaattgtccgaagacgagatccgcgccatcacgagacggttcacggcagcgatcgcgccgctcatcggaccggaacaggatatccctgctcctgatgtaggaacaaatgccgctgtcatgggctggatgatggacacgtacagtatgctgaaaggccactgtgtacacggcgtcgtgaccggcaagccgatcgaactcggcggagcgctcggccgcagtgaggcgacaggccgcggcgttatgtttacgacaaagaatgtattgaaaaagctcggcatagacccggagaacacgaccgttgccatccagggcatgggaaatgtcgggagtatcacggccaagcttcttcaccgggaaggaatgaaggtcgtcgctgtaagcgatgtatccgggggcatctacaaagagagcggcctcaatatacctgaaattctcgactacctgtcccagaacaggaagaacctgctctccggttatgaggaggacggcatgacacgcatcagcaatgcagagcttctggaactggatgtaaaagtgctcattcccgctgctcttgaaaatcagataaacgcagccaacgcagaacgtatccgggcagatatcatcgtggaagccgccaacggaccgactgcctctgaagccgacgacattctggccggaaaaggcgtccttgtcgtaccggacatactggcaaatgccggcggtgttgtcgtgtcttacttcgagtgggtacagaatatccagtctgtgagctggaccgaagagactgtcaacgaaaagcttaagaatatcatggatccggccttcgaggctgtctgggacatttcccgcaaaaataacgggacgctgcgcaccggagcgtacctcattgccgtgaaacgggtcgtggaggcaaagaaagcaagagccatctggccgtaaagaatactcattaacaacaaagcagcacattgtatgcgttctgtccgcatacaatgtgttgctttcgccttaaagcaaagttataatagaatcaacaacaaaaccggaggaatcttgagatgtttaattccatgaattacatatacgaagtatacaaggagcgcagtttttccaaagccgccgccaatctttacataagccagccatccttaagtgccgccgtcaaaaaggtggaggaaaagatcggcgctcccatatttgacagaagcgtaagcccgatcaagctcacggaatgcggacgccattacataaaagccgtggaagagatcatggatattcagaatcagtttgaaaattatatgacaaatataaacgaacttaagacaggacagatcgccatcggcgggagcaacctgttcgcttcttacatcctgcccccgatcatcacaagatttaccaagaagtatccgctcgtaaaagtacatctcatagaagccaatacgccccagctcatcgaccagctgttccacggcgcgctggaccttgtgatagacaattcctcctttccggacacgatctaccagcaccacctctacacaaaggagacgctgctgctggccgtgccgcggtcctttccttccaatcaggaagccgcctccttccagcttacgatagaggacatactggccgaccggcacctgatggaagacacgccgtgcgtgcctctttcacttttcgagcatgaaccttttgtctttctgcgctcaggcaatgacacccgctcccgcgcagataagatctgccagtcgcagtcctttcttccgaatatcgtattaaagcttgaccagcaggtcaccgcattcaacgtgtgctgttacggcatgggcgtgacttttgtgagcgactccctcctgaagcacatgccggacaaaagagactgttattactataaagtggatgacagccatacaggacgaagcatctgcttttatcataagcagacgaaatacgtgacgagagccatggaggaatttctgaaaactgcccgggaacaatccatgggagagacgcagctgtgaaatatgagcctccatgatcacgctttttatgcagaacagaaagaacaggaagacaagatagacgaacatgccgggttatgataaaatgaaaagaagacatccacacgtctcgcattataatggaggagcaatcaattcatggaaaacaaaaatatgtcagagaacaaaacggaaaaagcaggccagacctccagttatgatcacgatacacagtattttcagatgatgatggaggagtatgacggaaacatctacatcagcgatattgagacttatgatctgctctatctgaaccagactgcctgccgttctcttgaccgacacctggaagaaataataggctgtaaatgctataaagtgatccagggaagaaacgatccctgccccttctgtaccaacgataaactgcgtgaagacgagtattacgagtgggaattttacaatccggtccttgagcggacatttatgataaaagacaggctcatcaactggaacggccgtatggcgcgtttggaactgtcccatgatatgtatacgagcaaattcaaactggagaaaaagagccgggaacaggacgcgctgctgcgctctgtgcccggcggttttgcccgtctggatgcgcgggactgcagcaccgtactctggtacggggcggattttctcggtatgatcggatatacggcaaaacagtttgaacaagaactggacagccagtgcagctaccttcatcctgatgacctgcagcgcattatccccatcctgcatgaactggagacttccgggggcagcgcggtgaccgaggcacaggtcatcacccgcagcggcgagacgaagatcctgacgatcactctgtcttatgccagcggtgaggagagctgggacgggatcccatcattttatacgatcgggatcgacatcacaaaagagcgcatggagcaggaacgccagcggaaaatgctggaggacgcctacaagacggcccggatcgcaagcgaagccaaaactaattttctttcttccatgtcccacgatatacgcacgcccatgaacgccatcatgggaatgactgccatcgccgaggcgaatctttatgcaccggacaagctcaaagactgcctgtccaagatcaatgcttcggcccagcatctgctcggactgatcaacgaagttctcgatatgtccaagatagagagcggaaagatcgatctgaccttcgggacggtctctctgccggagctgtttcagaatatatcagatatgtgccggcctctggcgcaggagaaaaatcagaagttacagttcagcgttgatgatgtgtgtcataaaaccgtcataacagacgggggacggctccagcaggttctcatgaacctgctcacgaacgcgatcaaatatacgcctgaaggcggcgcgatcagcctgcacgtccgggagataccgtccgatgccgtatataagggacagtacgagtttattgtcacagacaacggaatcggtatgaccgccgaatacattcctcatatatttgaacctttcagcagagccgaagacacaaggatcaataagattcagggaaccggactcggactggctatcacgcagaatatcgtcaatatgatgaacggcacgatagaggtacagagtgagccggaaagcgggagccgctttatagtcgccgtccctcttgatctgtacagagaagacatgacaacgagcgcgcagcttaaaagtcaatccgtaaccccggatgaagaggcagcgcggctcgtggaggaagaaccgccctcttctctgtcgggcagacggatattgctcgtcgaagataatgatctgaaccgggagatcgcttctgagctgcttgaaatgcatggatgttccattgaagcggctgaaaacgggaagtttgcggtggaaaaatttgcacgttccgccccggaagaatacgactgtattctgatggatatacagatgccggtaatggacggatacgaagctgccagagcgatacgcgctctgaaacgggatgacgcgcggacggtccctatccttgccctgacagctaatgcctttgcgactgatctggcaaaggctcataatgcgggaatgaatgaccatattgcaaaaccgatcgacgtagaacgtctcttagagactcttaaccgatggatggtgtgatccgcgccttttgtctgaatacagatacacacaactaaaaaggagccgctcttcattcaaagagccggctccttttcacttttttaccggatccactgttcctcatctgagtatgggatgatcggcaggttgatataagaattgtgtacgctgtccacaaatatcttgtattcgatatcctggctgttcggcagctgtaccatccagtggtacgggttcgcatcgtagtttttcacttcaacttctatgcggtggcctttgcggaatacattggatgtgttcatgatctcgatcgtgtattcgttgatctcgcccggaactaccggaacttttctcgtatggtcgttattaagctcccacggcttcagttccttcttctccagtccccggtgggaagcccgcagatttccagtcacaaggttcagagggcgcccttcgccttccggcggcacgtcattgagcatgaccgtaaagttggcgtccgtcttgtcgatggcgcacataagatgcatgacgatcggtcctgtaacctccacatcttcctccagcacaggtgtgcggaacacgacattgggcactgcgtatgtctcattggagccgccttcatacgggctcttatgatttaagaccgtcggctttacatgctcatccttttctttttctgtggagagcagtccgccgtctctcaggtaatatttcgtccactgcgtacgtgccagcggccattcatattcatagcggaacttgttgatccctctcacgagaagcttcatcggaggttcatccataacacctgtatcaatgcctttgagccagtaatcataccagcgcagatattccggcgtcatgatacggtgcggcaaatgcagcgcgtcatgctcttccggagctgcgagctttctcggcaccgacatgtctccgtgcgtgaacaggaagaacggaccctgtgaaaatcttccaagttcatagtattctgagatgagatacataggaaccttgatgtcctcaggatggctctcaatagaacgctccctccagaagtcactgtcatcatcgtgcagaagcatatcaaagaaatatgtctgatttctcggcggccagcagttcaaaataccagagtaaagcgcactgtgattgatatccggatcggacagtctcttttcaatgcgtgctttcagctcttctgtcgtatatgtgcgctccgccgtggacatagagtttacgtccggacagaaatctgtgtacataaaggaacggttcacaaacactccgcccggatagttatggtgatacatgttgtctacgacttctaccatcatgatagccttcaggtgcggcggctgcagcgctgccactaccggctgcagtattgaaaagtatgaaatacctatcatacctatgtttccgttacagtaaggaagcgctgccgtccactcgataacgtcataacagtcctcctgctcctgtcttccgtagaggccgtcccaggctccctcggacttgccgatccctctcgggtcaggcactactacgatatagccgtgttttacatactcatatatgtctccggcttctatcgtatggtcaaacaatacggtcttgaactgcatggagatacggtccattgtctgaatggattttccataggcagaaaaagcaacgagtcccgggaacttaatgtcctcctctgtgtcaggacggtagatatccaccgccagtgtgacaccatctctgacctgcatccgtacatcctcttccttgagaacgtcatacatgcgcggcgtcatcttctcaatgccgtccatataacgctcatcccaatattttggcttttcgtccagaccgacgatttctaatttttctttattttccattgcgtcctcctactctattccacccagtttttctcaccgtttacgatcggaagttcgatccatgaggcagcttcgctgtccacgtggatgtcaaagtttacttcccttgcaagcggatgcggtcctgccacacgtccggatgtatacagcctaggcaggctggccatttcgttaaagtcaaaatactgctggtccatcgtcttgaattctacttcgatctgatggcctttcttaaagagattgtcgacaggggccagttcaaagatatattcatacactttgcccgcctccaccggttcatcctttgtatgtgcatgtttcggccggtgctctgtgccggatggatccagctctctgtgagaacacttgagataaccgcaggagagcagcgtgcggtattcggtctcggcgtctttatcccaaagcttcatggccagatgggcatcgtccgtatcgatcgcagcctgaatgcatcccgtaacaggaccgcatatttccacctcttctttcagaggagccgacgtgtacgtaagagcaggcacatcttccggcatctgtgagagacgtgtcggcggaatatgacggatctggtccggcgccgctgttcctgtctctttttcctctgtcaggcggctttccttcctgaaatacatcttcttatattctgtgtctgcgcatggccactgtgtatcatagcggtatctgttctctcccatgacgagaaacttcatcggaggctcatccataatgccggtatccatccccttcagccagtgatcataccatctgagctgctctgccacaggtttctcatacggagacgtcttggcggaagccgggtctatcatcagcagcttcttcggaacattgtcatcgatcttattataaatgtcatatgctgatatggtcgtatggccatattcataataaagtcccactatataggacggtatcgtcaccttccggtctttgaagcttcttctgtcccaccactcgccactgtacggatggagcataatgtcaatattccatgtatagtgtctcggcgggaagctgtccagacctctgtaatagtaagagttcgtagcgatctccggctgcctcctcgctttcgcgagcatctctttcaagtcctctggactgttctccatctctgcctcagatatcgtattcgtgtgcggaatgtaactgcagagcggatagttgatatcacttaatatcccgcccggatagcagtcgaggtacatgtcatcgatcacatccaccggcatgactgccttcagataaggaggattcatcgatgccacaagaggctggatctttcctgcatagccgcatccgatcatgcctacgtttccgtcagacagataatgtcccgcccagcggataacttcacagcagtcgatctgatcctgtctgctcagcactcccgtccatatgccttctgagttctggatccccctcgggttcaccacaacgaccgtataaccacgggatgcgaagaaatcaatgcctccgacttcgatgccctgttcatacatgaatttcccaagctggatcggatcacgccttcttcctgcttcctgagccgctttaccaaacggggaaaagcccacgagcaccggatgcttctctttgtcatccggcctgtaaacgtcgcagtagagtcggatatcgtctttcataacgatcgggcggtctttttccaccctgatctcatattctggttctctaataatttgactgttcacgttttacctccaatcacatcaccttattaaacttatatttttattccctgttaaagccattttacacttttccctccggggcaaagtcaagacttaatttttcagcagcccgtacagattttccgccgtctgtctcacatcttcaaagctgctgaaaagcggtgagaatgctatgcgcacctgatcgtccgatgatgcggcagtgccggaatctctcttttcttttaccgcggctcttaacttatccgtcatccgggagccgctgtcgaggaattctgtaatgtccggggccgccgcgtgcaggatcgtcacatgcccgcctcttcttgcctcttcccggggcgtgagtatgctgatgccgcagtcagacggcattgcgtccagaagctccataaaataaccggtcatggcaagagacttttcacggatcgcgccgatccccgcctcattcaccatatcaagcgctccctcaagcggagccatgttcagaatgaggggcgagccgtgctgccatccgccggctccggtctccgcctcaaaataaggaagcttctgaaactggcggctctttacatagccgtgccatccgggcatggccaccgggagatcaaagttcttttcatgaataaagatagtggccggacagccgagacctccgttcagatacttgtaattacaccacacggcaaagtccacgccccactcatgaagcttgtgaggcacgacacccgcggaatgactcaggtcaaatcccaccgggatccctcttcgctcggcctccccggccagacgctccatatcgagaagctggccggtggaatggacaacagaggggaaaaaggcaagcgccgtctcctctgtcatatgtgtgatcagatcctcttcatccaggatgggaccgtctcctcccgccaggacaagcacttcttccgggtcaagtcctttaagtcttatctgagcctccaccgcatatctgtcggaagaaaagatctgactgtcacagagcagctttgtccgctttccttccgggcggtaaaatgcggcgagcacactgtggatattcgtggtggtcgtcccgttgataatgagctctctctcctgcgctcccacaattccttcttccatggcggcgatccgctccgggtaatagaaccatgggatctcaccgcagaaccatcctgccaccagctgattcttccactcgtccgccacccgcttaagtgtcttctccgaacggcgggacataggtcccaggccgttcgcttcataatacaggtgatcgggaagatagaactcttctttatatctgcttaacttatctttttcgtccaggcaggatgcatattccctgctcattatttctgccattttgtaacctcccaggcaaaagtgccgtttttaaatattctactcttcttcccagctgacttctactttgacctttcctgacttataccggacaaccataaagatgaatgtcagcacgagcagtatgatattgccgataatgatctcaggcgtattgtcttcgatcagcagataattctggaagatgaggagcgcgccgcacaggtagcataccaccttcagaacaccgtcggatatcttaaacgtagactttgcccacgcctccggaagcagcttcggaagccgcgctgtcgccactacaacgaggaatgtagtgatattcataaggatcatggacatgttggcgatacggtctatatcaagtcctgcgacaaccggtatgagacctacgatgtagaataagatcagcaggtaatgcggcgtaccgtatttatcgttgatcttgccgagcttctttggaaaccatccgtcaacacatgcctgaagcaccggctttgtcacccatccgaacgttgcgttcaatgtcgtggaaagcgccagaagcgcgccgcccgtcacaaagaatacatacagagccttcggaaggaacgcgcctgccgctacgctgagcggctgatacataacttcttccaccggaagcacacctgcagccacaaatccgatcacagcataaagcgcggtaacgatcaatgtggaaagtacgatcgcaaacgggacgtcttttgtaggattcttacattcaccggaaaagtttacaagatttccgccgccggtcgttgcaaatgaggtgaagatcgcggccatgcagaagcctttccatcctcccatgaaaagcggaggctctacgtttgtaaaatatcctggttctacattaaacacacctactgccgcaaataccgcaagtgcggccgcaaggatgataacgagaatattctggataaatgcggcgtcttttacaccgaacagattgatgacaaagaacagagtcagcgcggcgaccgccagcggaactctcggtatccccggaacgagcgccagcagatagtccgcaagggacagtgcatacattccgatcgatatattgccgacgatatagataattatgtaaaaaccagaaaaacgttcaccgagcagcaggcttgccatcgtatactgtccgcctcttaagcggaccgcgcttccggcaaagatactcggtatcgttactgccagtgagaacagcgctccgaacaggaatgcaaacacaacagaacgtcctgtgaacccaatagccacgccggtcagtgaaaatacgccggagccgatgatctgcccaagccccatggagatcagttcttttttccctaatacacggcgcagttttttggtcgtatattcctcagttacattagctgttgcttcattagaatttcccataaaattaccctccttctctctctttctctgtttatccttctgccacacataccgcgcgtaccggtgaaccgtctgcctcgatcagtttcagcggcaggaaggaatatgtcgcagcttcttttggcagctcatccagattgcacagatattctacgatcagacactcatttccaagcagagccgcatgggcttcattcttgatattctcacgctcaatattttcaaggatctctgaaaatgtcgggttctcaagccgcttcgccgttgaaaatccgtaggccgcatccgcggagcttccgtccgtcccgacgatctttatccccagctcaacgagggccagcgcagcgtcgccgcttaaatacgggtggcggaagaaatcccatgtcccgtagtattgtgcccatccggtattcaggatcgcaaaatccacttttttaagttcttccgcgtgggccataatatcctcgcgggtgatctcatagatctcacctttatcgctgaagtccagaacaatgcctttcccgacaaagcgttccaccgggaaatcattcaggttcttcccgtctttgctgatatggtacggcgcgtcaatatgtgtggaggtgtgcgtccccattttcataaactttacattaacgccctcctcttctgtcgtcgcataatcctccacgaccggcactttgtcgcacgggcacacctgggtatcgttgttgatctcccttgtcaaatcaataaatctcattttgcctcctccttcctatctgacaaattcctctcctcttttctggaccggaatctgtatctctgttacaaattcttttggatcgtctgtcgtaaaatcgtccatatggaattcttcacgtatattccccacgactttatatccattctcctcaatccacgtaagtatcgcttcataggagtcgatcacgctctcatgttcccccgtatgcagaagatatgcgacctcttcatatccttcctgtctcttgtgccggatcctctctgtctccggaaacggagccaggaccctcttgaggatctcgacctggatctcgtcacttttgtatacggaatcgtaatagatggtgtatctttcattccctacctttgccctgcatttgttcagatactcgagcagctccgcccagagtgcgtcctgtgtggaataagtgctgatagacgccttcaggctcgccacctgcatctcttcgaccttctttatccccaccttgaaggatgacagctcgatccctccttctttgtccagcttctttttcagcagctcgatcgtctgcttcttttcattcagctcctggatctgtcggtcaaactccagctgtttaagctccagcacccctttcagcagggtatgatctttatcaacctcctctttcatcagataagtgatctccttcaaagaaagccccatctccttaagcaggaagatttcgtttaatacaggtatctgtgatgatgtgtaatagcggtagcctgtcgcctcatctacgtatttgggcctcaaaagtccaagctcgtcgtaatacctgagtgtctttccggagattctgtaaatacttgccaactgtccaatccgaaacatatcttcgcctcctagcgcctgaatcatatgtttaaattgtatgctcacattgtaaaagatttccccaagggtaaagtcaatactattttgcaatttaaactataatcctaaattttacggtagtttttagtgcattttatacaaattatcactgttatttttacttattctttccaaaaaaggaaatacaaacacactatctactataaactaatattcatataatgtccttatatagttacattttgtccttaaacagatgcttttacttgaaaatattttattcttttgtaacgaaacgtattctcgtgcgtctaatgtacaaaccagatgagacaaaggcattgacattgaaagagatctggttaaaaatcaagtatacttgtactagactaaattcagccggccggcatacaaaaggggggtggcggactaaatggacatagattttgaagagatatataaccgctatttcaaagatgtctatctctttatactgacgctcagcaaaaatccggagcttgcggaagaaataacacaggaaacgttttttaaggcattaaaggaaatcagacatttccgcggcggctgcagtataaagtcgtggctctgccagatcgccaaaaacatttatttctctcacatgcgcagacagaaatttacagcagacagagacgtgccgctgccggcctcctctgcagacgtcgagcagtcatatctgaataaggaaaaagcgcgttccatctatcagatactgcatacactggaggaaccgtacaaggaggtattcctgcttagaacactcggggagctcagctacagagaaataggtgatatcttctcccacaacgaaagctgggccagagtcacataccacagagcaaagctgaaaatacgcgaacaacttacagcggaatagaaaggaggacgttcaatgggaaatataccgtgtgatctgataaaagatctgctgcccctgtatacagatgacgtatgcagcgaacagacaaaacataccgttgaagaacatcttgccacatgtgaaagatgccgggaaatatatgaggatatgcaggaaaagctgccgggagaaaaagagattgggctggacgctgagcttaaggacgatattgctttcatccgcagtgtaaaaagacagcttacacgccgccagcttacgctcatctttatactcataccggtgtttgtcgtgatactcatactgacgccgactgtactatccgagctttccacggtacgtacggatgatattaaagtgactgaattatatgaattgtcaaacggagatatctactgtacgatcgaaagcaagaaagccatatccactctttcggcgggaaatcttatgtcaggtgaaaaagatacgaaagggagggaatactgtgacggagtcataacggccggctttccctctgccttcacaacgcttttggatatgcagaaagaccggtttcctgttttgatccggtcgcagagttttatatttactaccggcaagatcgtagaatacggcggagcgacgataggaggcaaggataccgacagccactgccgttccatcaaatacaaaggaaggcataaagaggaactcgtcatctggaaggaaggccagaaacttgagcccgctcctgaacagatagaaaagatgcttaaggaaagcgaagttccggatccggccgtaacggtaagtaccgagcagcttaaaatcggtgatgtgctcgttatctattagagcaatatgacaaaaagcaggtgcgtcagctacacaatgtatagctgacgtacctgcttttctttatttttgtcctgcactgtgaccgcggacttatctaaagaacacccagatatgttccgaccatctcaaattcatctgcgtacacacaattcttcagcgtgccgtcttccattcttttcctgcattcctcataatctatccagaccacttcttctacttcggattcctgcagtctaagttccccggccctcaccggttccgcgtacacgtacacagcgctcagttcctcatctttaaacggcctcccgtaaaatacatcctcaaacccgccgcggtgtatccccacatactgcagttcgctctctgacgctgatatcccaagctcttctgaaagttctctgaccgcggaagggagataatcttctccggccgcgatatgacccgcagaggatatatcataaaagccgggatgggagtccttggatgcgctccttttctgaagcagcacatcaaatccgctcttgtcattctcccgcacgacccatatatggacggtggcatgcaggcttccctcgcggtgcgcgacaccgcgctctctgacgatccccgacgggcttccgtccgggttccttacatcgaacagctccatcggctcgccgttcaaagacgctgagacgagtttgtcgtggccgtcgtagacaagcttgagcgagaaaaattccttctgctcgtccataaggcggaaaaatattttatcgccttcccatatgttcagcttccagacgtcctcaatgccgacccatgcaagctctccctcgtcgcacggtatcggttccccttcaaaaccatctgccgtgaacagagacatatattcggtgacgccgtttcctgatacaaaggtgacgataccccggtaccggtaggaagtgagcgtgtacccggtctcctcccgcacttccctgagcaggcattcctcggggctttcgtccgcctcgaaatgtccgcccacaccgatccatttgtcctgattgacatcatttttcttcaccgtcctgtgaagcatcagatatttgccttcacgctcgatatagcaaagtgtgctcagacttgtcattcctgttccctctctgctttctgtttgatcttacggcgtttatagattatgagaccaagcgaaacgacagcgattatgcctgccagcacctgggacaccggccagccggctcccgggatcagaagctggtctgtgcgcagcccttcgatccacgcgcgcccgatgccgtagccgagcagatagacgaggaacacttcgccgtcaaactttttgtattttcggtatatgagcataatgatcagcaccataagacaccagagcgactcatacaaaaaagtcggatgcacctggatatacgagacgccccctgtattctccatatggctgcgcataagctccgtgatgtcagaaccgcgcaccgcatccaccggcagccgcatggccagcagattatccgtgtattcgccaaaggcctctctgttaaaaaagttgccccagcgtccgatcatctgtcctgccacgagaccaagcccggcagtatcaaagataagcgccgcggacagcttcttgatccttgcgtatatgaacaccgtgatcacggcggcaatgacgcctccgtagatagcgagtcctccctgccgggtgttaaaaatactgagcaggttatctttatacatatcccatgaaaacgcgacgtaatagatcctggcgccgattatggaaaagatcaccgcatagatcgccagatcaaaatagtcgtccggattctgcccgctccgcttcgcctccgcggcggctatgaatatcccggccagaatgccaaggccgattatcataccgtaaaaagcaatatcaaaaccaaataccgttatatggtctccgacagacttcagatgaatcccgatattcggaaagtcgattgtcctgtgcatttatcatcccctcttccctcttatacgttgaacctgaacagcatgatatcaccgtccttgacaacatactcttttccttccagcctgacgagccccttctcttttgccgccccgtggctgccgcactccatcaggtcatcgtaagacacgacctccgcacggataaagcctctctcaaaatcggtgtggatcttgccggctgcctgcggcgcttttgtcccttctgttatcgtccacgcgcgcacttccggctctcccgctgtcagatagctgatgagcccgagcagtctgtaactggctttgatcagtttctcaagaccggattcctcaagaccaagctcttccagaaacatcttcttctcttcgtcatccagctccgcgatctcctgctcgatctgggcgcagactacgaacacctcgctcgcttctttagacgcatattcgcgtaccgcctgaactcccgcattctccgccccgtcgtctgcaaggtcgtcttccgccacatttgcggcatatatgaccggtttatatgtgagaagattatagcttttaagccactcctcttcttcctcgtcctctgtcttatcgaacgtttttgccagtctgttttcctccagatgtacctttatcttttcgagaagcgcaagctcttttgccgctgtcttgtcatttctcgccacctttgccgtcttggagattcttcgctccaatatctccagatcagagaatatgagctccagattgatcgtctcaatgtcacgcagcggatctatgctcccgtcaacgtgtacgatattgccgtcctcaaaacagcggacaacatgtacgatggcgtccacctcgcgaatattggcaagaaactgatttccgagaccttcccccttggaagcgccttttacgagtcctgcgatgtctacaaactctatggcggccgggatgatctttttcgtgtgatacatctctcccagtacattcagtctctcgtccggcaccgtaacgacgccgacgttcggatctatcgtacagaacggatagtttgccgattctgcccctgcttttgtcaacgaattaaataatgtactctttcctacattaggtaatcccacaattcctaacttcatctgtaatgtcctctctttgcatatatttttaagaggggcctgacccctcctgaaaagggtcagacccctttgctgtctcttgtctccataagtatgaccataccgccgccaaattctatgacaacctcgtcggcttcgatctggttgctcacgcagagactgtcatacggagtgagcgtatggtccttcaacggatattttgctccggttatgttaaatccatacaccgtctccccaagcgggaatacggaaaaatacgggccgtacgcgtcttcttttttcaggtgcgtctcttcgccgataagccggatccggttctgcgtatcaatgatatatgcatccacgcctgccttaaaaggtacggtgagcgtctgcacatttgcccacagatggtcgatccgtcctccggttgccccgaggatgatcagttcttttcccccgagcgtcatggccagcctcacagcgatctccgtgtccgacgcatcctttacagggttgaactctcttaccggcacattcgtctgcgtgcggtaatacgccgctatctcagggtccgtactatcaaaatctccgacgatataatccggggtaatgtgatgactgtagagaaactccatccctttatccacacctatcacatagctgccgcccttttcgtccagataggacagcgccagctgctcgtccagttcaccgccgcttacgatcacgatcttcttactcataactttttaatatctccataaattcacttgtgttcctgcccgggtctccattaaatactgcggaaccggccacaatgatatttgccccggcgtccagcacttcacgcacattgctcagatatatgccgccgtcaacctgaatatccaggccgagcccctgttccgaagccatacgccggatggtcctgatcttatcaagagattccgggataaacttctggccgccgaagccgggatgtacactcatcacaagcagcatatcgatatctttgagataccgctccaccgccgaagcgtcagtctccgggcagacggacaggcctgccttcatcccgcattctctgatcttatcaagcgcagctccaacatcttcacatgcctccaggtggaccgtcacgatatcggccccggcatctttaaaatcctccacataacgtatcgggtcctgcaccataagatgggcatccatcacctggtctgtcacattgtgaatggatttcagaaccggcatgccaaatgaaatgcttggcacaaacatgccgtccatcacgtcaaaatgcagatatttcgccccgttttctgctgtgcgcttcatctcttcgcccagcacggtaaaatcggccgccagtatcgacggcgccagaatatattccatggatcagtacctcctctttttcttcagttcctcatacatatctacatagtttttatagcggacactgtggataagccccttatcaagtgcttcctttacaccacagcccggctcatggatatggtcacatccgtgaaaccggcacgtcccttcaaaaggagcaaattccggaaaatactgtttcagctcctctttttcaaaatcattcacatacagagagctgaagcccggcgtgtccatgatgtatgcatcctcaccgaccggaaacagctccgtatgcctcgtcgtgtgctttccccgctctatcttcgtgctgatcgcgcctgtctccatattggcttcgggctgcagaatattgatgagcgacgattttcctacgccggacggccctgccaccgccgtcgtcctgcccttcagcacttccctcaccttgtctatgttctgtcccagccgcgcactcgtaaacagaagcgggtaaccgcagtccgcatagatctccttcagctctttcacctggggatccgtcgcgatatcctccttgttaaaacagagaatgaccggtatacccttgctctccatcatcacaagaaatctgtccagcaggttgaaatgagggcttggcctggcgatcgcaaatacgacgagcgcctggtcaatatttgccaccgccggccttataagctcattgcgccttggcagtatcttttcaatattcccttctctgcctgattcacttaagacttctatctctacgtcatctcccacgagaggctttatcttctctttccggaagacacctttcgctttacactcataaacaccggattctactacgtgaacgtagtagaatccggcaattccttttataatctttcccttcatgctctttcctgtcccactgtatccaccgccgttactgcgagtcactgtcaccggggttctcggcaggcggctgctgtggagctctgctaatgacaagattaatcttcgtccccttcgatacactggttccagcgccaggctcacatctaataacaacgcccgcaccaaacctgtcactctcttcttctgaaactgtacctacagaaagacccgcattttgaattctttgcctagcatcgtattccgctgcaccaataacgttcggaacacttatcttctcctccggcttcttcccgctgctcaccgcaaagtctactgtggttcctttggaaactttctttccgccgttcaggctctgtgatacgacgttccctttctctacactgtcattatagtcataggtcacggtccccacattaaggcctgcatctgaaagagcagttctggccgcgctctcgctcataccgcggatatccggcactgtcttcttctcagagcccttgctcaccttcatgatgatctccgtatccttcgtgaccttagcatttgcggatggggtcgtgccgatgacatcgccttccgccacattatcatcatagacgaattctgagcttccgaccttcaggccttcatcctcaagagctttctgggcatctgcctcactcattccgctgacatcaggtactgtgatctcatcccccacaaggtctgagcttacgactacttccaccgttgaattcttctttactttcttaccggcctcggtcttctgctcgctcactgtgcccttttcgtatttctttgactccttgcgggcgactaccttcatgccgagccctttcttcttgagcgccgccttcgcgtcgtcctcagtcatgcctaccacatcaggcactttcactttgccggtatccgtctcttctgtattcattttcgggccaaacttaaagatacctgccgctttcccgatcgtgaatatgaggatgaacacgatgataacaacaaccacgatcgtaaggatcttcatgatcttattcatccgcggatttacttcatctgaattctttcctcttctgccccgcttaccatcttttccgccgtattcgtcatcatcgtcatcgtactcgccgtcaccatattcatcgtcatcatactcgtcgccgccgtactcatcgtcatcgtactcgtcttcatcatactcgtagtcgtcttcgtcgagctcttcttcatcgtaggagcttcggatatcatccagttcctcgtccgtgatgatgaccgtatccgcattgcgaagcggcggaataacgacaaaatccccatccggatccacgagagaacgtttcaggtcctggatgagttctgttgtacttgcgtatcttctctccgcattcttctgtgtacatttcaggatgatctgttccagactgtacggaatgtcaggtacaagttccgacggcggcgtgatctcttcctgcagatgtttgatggcgaccgcaaccgtagattctccgtcaaaaggcacctcccccgtagccatctcaaacagagtgatccctatggagtagacatcactcttcgcatcgctgaagccgcctctggcctgttccggggacgtataatgcacggaacccatggcgtttgaactgatcgtattggacgtcgtcgccttggcgatgccgaaatctgtcaccttcaccttcccgtccctggaaattatgatattctgcggctttatgtctctgtgtatgatattggcattgtgtgccgcgccgattccggtacacatctgtatcgcgatgctgataacttccttgtgggataatctccctttcttctctatataatccttcagcgtgatcccttccaccagttccatcaccatataatacaggccccggtcttcgccgacatcgtacacattgacgatattaggattcataagtccggccgccgcctgtgcctcagagcggaacttgcggacaaaattatcatcttctttatattctttttttaacactttgattgccacgtagcgattgagcatatggtccttgcctttatagacatcggccatccccccggcaccaatcttactaagcacctcataacgttttcctaaataaattccatcctttaccatgtactcacctcatctgaaagtggctccgccataacaacccctatgttatctctcccgccattactgtttgccttttcgatcaacatctgcactgcttccacgatatctctcgcgccctttacgatgtcgaacatatcctcatcttctaccatattgctgagaccgtccgtacacatcagtatcgtgtccccctttttcagacggtactcatatacatccgcctccacatccggctttacgccgatggccctcgtgatgatatttttatccggatgatttttggcttcctcttcttttatgccgccaagccttaccatttcttccacgagagaatggtctttggacagctggcgtattttatcgttgatcaggtacagacggctgtctcctacattggcaaaatagagcgtattgcccaccactgtcgccgccacgagcgttgtacccataccttccagtttcacatcggcggccgcggcttctatcagcatattatttgctgtcgccaccaccccccgcaggatttcctccggtcggccgacagatgtctgctccagttctttcctgagcaccgtgactgtatattttgacgcaaagtcgccggctttatggccgcccattccatcggcaaccgccagcaggttcggaaacggcccgatgggcttatccgtcacgtatacataatcctgattgacttcacgctttcttcccacatcagtcatcgcatatatcttcatctgattctccctctgtcaccgcagtgtaacgtctgcgaagctgtccgcaggctccgtctatatccgagcctctttcccttcttatagtaacattaattccgtttttttcaagtttatttttgaattcatgggcatttttactgtccgggcggacaaaattacgctcctttatcggatttaccggaatcaggttcagatgacagttccggcgcttcagtaacgccgtcagctctcttacatcttccggctggtcatttaccccctgtacgagactgtattcaaacgtgatcctgcgtcctgtcttctcaaaataatagtcacatgcctccagcacttctgccagttcatatttattcgccaccggcatgagggccttccgcttttcctgcgtggaaccgtgcagcgacagcgccagcgtgatctgaagatcctcctctgccagccgcctcatgttcggtacgatgccgcacgttgacgccgtaatatttctctggctgatgttgagtccatgttcatcgctgaccatatggataaactgaagaaaattatcatagttgtccagcggctctcccgttcccatcacaaccacatttgatatccgctctccgatcagcttctggatctggtatatctgccgcagcatctcggacggggtcagattccgcataagcccgtccagcgtcgatgcgcagaaacggcagcccatgcggcagcctgcctgagatgagatacagacggaattgccgtaactgtaacgcatgagaacactttcgaccatattgccgtcacagagcctgaacaggaacttttccgtaggatcgaccgaggagatctgacgctctgtcagcgtcacttcccgtatctcatactctgcgctcagctgttccctcaattttttggagagattggtcatctcatcaaagctgtccgcaagcctgacatgaagccactcatatatctgtctgctgcggaagctcttttctcccatcgcctctatctcatttttcagttgtccgtgatcgtacgaacatatatcctttttaatcatggttctccttctggaacagagctatatagaatccgtctccttcatccaggccggggatcatctgcttttccctcacgaggctgaagccggggtacgtatttttgaaccacctggcatttccctcgttctcttcccagctgactgtacatgtactgtataccagctttcctcccggtttcacataagcctgcacaacagacagtatcttccgctgaagcgctgccagctctttctgcatttcctccgtcatcttatatttaagatccggcttctttcctatcacgccaagcccggaacacggaagatccgcgatcacgatgtctgctgattccgccgcagaccggtcgggcaccgtcgcgtcccatttcaccgcttctatattcttaagaccgctccgctcaatattttcttcaataagccttactttatatcctgtcaggtctctcgcctccacatggccggtgccgtgcagccgctccgccatatgaagcgccttgcctcccggcgccgcgcacacgtctatgaccgtatcccctttcctgggagccgcccagtgcacagtgcgcatggagttgatatcctgcacataataatatcctctgcggaaactctcaagcccgccgagataattatagccatatatatggagcgcagccgggaactccggtatctcctctgtgcggactccttcttccttcagcatctctgtcagcgcttctctgcttatgcggtccgggttgaaccggatcgtcaccggcttttctttcagaaaatcctcagccatgacaaggacattgtcttccccgtaacgctcaagccactgttccagtatccacttcggcagtgaatacctgaccgacagatgctctatgtaatccttcgggtacgcgatcttgttcatattccggcttatattgcgaaggacgccgttcacaaatgccttgagacttgcaaagccccttttttccgcaagcttcaccgcctcgttgcacacagcgctgtccggcacactgtccatatatttcagctggtacacaccgcttcttatgatggcgcctatgaccggtttcattctgtttacttttacttttgaaaactgattgataatataatcgatttctataagatgttccagcgtgccgtttatcactctcgtgataaacgcacgctgctttttatccagatactggtacttctcgagcacattgcgcagggcaatgtggcagtattcaccttcccgtgttatctgcagcagtgtatccagtatcagttctctttcatttaccgatgacgccatattttattccccctcatatggattaatcgtttcttcttcctcctgtgaggaggagtatcctaagcagctgaagtatggcagacgccgcgccggccacgtacgtcaatgcagccgcagtgagcaccttcttcgtgtcggcgatctcgctttcatacagcagtcccgtgctcccgagcatcttgaccgccctgctcgatgcgttaaattctaccggcagtgtgatgatctggaaaagtaccgccagagagaacgcaatgatcccaagattgagcagaagcgcggaagaactgctgttaaacagcagtccgatcagtatgagcggccaggcgatcgcgcttccgaaattcgccacgggcacgagcgctccccgcagggagagcggcgcataaccctgcgcatgctgcatcgcatgtccgcactcatgggcggcaactccgatcgccgccacggacgtagaattgtatgtcgcgtcggacagccttaacactttgcttctcggatcataatggtctgtcagattcccctgaacatgctctacctttacatcatagatccccgccccgcgcagaacatgttctgccgcatctttgccggtcatgcctgtatgactgcggacacgggaatatttattgaatgtggcgttcatcttcgccgatgccagaagacatatgatgacacctatcagaacaagaaaatacgttggatcaaaatacatcattggatatatcatttattagcctcctttaacatgtataagacttattatatatgaaaaagaggaaaaatagcggttcttcataaaattttaacactttttaaccaagttcacaccctttttctatcttatagcctctgagaaacgcgcctgcctccatccgcttcttccccgggatctgaagcgaacgcaccttgagaagtccgtctcctgtctgtacgcaaaatccgtctttttctaccgatacgaccgttcccggaagcgtctgggtattctgtgccacaacatctgcctcccagatcttcatcactttatcgtcccaccgcgtatatgcgctgggccacgggttcagtccccggataagccgttcgatcgtctgcgcgtctttcttccagtcgatacttcccatgtctttatcgagcatccgggcatattccgtcgtagtctctccctgcttttcaaaggaagcgcttccttcttccagcgccttaagcgtttctacgcagaggaccgcgccggcggcagacagtttgtcaaacagactgccgccggtctccttttcatccagcacaacttccttctttaagatcatgtcgcccgtatccagaccttcgtccatctgcatcgtcgtaactccggatacgtcctctccgtttatgaccgcccactgtatgggcgcggctcctctgtacttcggaagcagtgacgcatgtacattgacgcagccgtagggagtcatctccagaatctctttcggcagtatctgtccaaacgcgatgacgaccataatatctgccccgtaacggcgcagctcttctatacactccgcctgccgtactttctttggctgaaagacaggtatcccgtatttcagcgcagtctccttgacaggagaatactgcatcttcccgcctctgcccttcggcttgtcaggctgcgtcaccgcgagcacgatttcatgaccagcctcaatgagcgcctcaaatgtcccgaccgaaaaatccggcgttcccatgaaaataatcttcatcttactcttcctccccggctcctacgtcatgaagtccgtcctctgtgagctccacatacatattgccgtccagatggtctatctcatggcagaatgcccgggccaaaagcccggttccttccagctctctctcctgcatatcttcgtcaagcgccctcaccctgacataatccggccttgtgacgatcccgtattttccgggaacactcaggcatccttcctcccctgtctgttccccggacgtctctatgatctccggattgataagtacgatcggaccttctcccacgtcgatcgtgacgatccttttgagcacgcccacctggggcgccgcaagccctacgccgtacgcctcgtacatcgtgtcaaacatatcgttgatgagcacttttgtgcgcagcgtaagtttatccaccggcttacatgtttttgtcaatacctcttcgccaagttcccgaatctttctcgttgccatatgctttcctctccttaaaatacattcatgggattgaaatcaaactgtatcctcagcgtctgaaatcccctgttgatctctatatattgttccagcctgttctttgcttccgtgagcagacggtactccccgcatttaatgtagagcactttccggtacacgtcatttacctttcccacgcccggactggcgggacctatcacctggagccggccgccgcggccgatcctgacgacgtactctttcacatacccggccgctttttcaagcagctgttcatcccgccctgtcatcagcacggcgagcagctgttccaccggagggtatcccatcagttcccggtattccatctccgcctcataaaacccttcatagtcctgagcggcagccatccggatactgtagtggtccggactgtatgtctgaatgataacttctcctttgccgctgcctcttccggctctcccggccgcctgtgtcagcagctggaacgtccgctctcccgcccggtaatcattggaatataatgacatatctgcggccaggatcccgacaagtgtaacatttggaaaatcgtgccctttcactatcatctgggtgccgatgagtatatccgcctctccggacgcaaacgactcaagtatcttttcatggccgtccttctccctcgtggtgtccatatccatgcggaggaccctggcttttggaaatgctttcttaacgatatcctcgatctgctgtgtccccgctctgaacccgccgataaatgtggagccgcaggacggacacgcactcaccgaaggctcctcgtgtccacagtagtggcacacaagcctgccgtttctgtgagctgacaatgacacatcacaatgaggacattttactacatatccgcatgctctgcaagaaatgaaacctgcatacccccgccggttcaggaaaagcatcgtctgctctcccctttcaagccgcagggcgatcatccccttcagacggtcgctcaggatagagcggttgccgttctcaagctcttttctcatatctacggtatagacgtccggcagcccaagactctgcgtcctgttcctgagctccagcagcgtatattctttcctgcggcagcggtaaaaggattcaagcgacggcgttgcggagccaagtaccacgctggctccctcaatagccgcccgctcgatcgcagtctctctggcgtgatatctcggaacctgttcgctcttgtatgtcgactcgtgttcctcgtcaagcacgatcaggccaagatcagaaaacggagtaaacagcgccgaacgcggccctatcatcacatcgaccgcaccggatctgacacgctccatctgatcgtagcgctctccctgggagagcctcgaattcagtatagatacccggtctccgaaccgcccgtaaaaccgcatcacggtctgatacgtcagcgcgatctccggaatgagcacgatggcctgttttccttcctgcacgaccctgtggatcatctccatatatacttctgtcttaccgcttcccgtgacgccgtataaaaggtacgttcctcttatcccttctctgtagtctccccagaaagtatctatgacattccgctgttccttcgtatattccacttcctgccgctgttttaccctgtgccggaccggattgcggaattctctctcagaatcaagcgcaagtaccccctgctcttccagcgcccgtatcaccggcatggtaatgttcagcttcttcgtgacgagctcatactcctgttccggctggtccagcagcccggcgagcaggcgggccctcgctttctggtttttgtgaaggtatacatccagctgtttctttccttcctcctcctcaagaagcagtctcacacgtctcttttctctcggctgctcttttctcttaatgggcagcacagtcttcagcgcctggatcatcgtaccgccgtaatgctcgtgcatccatgccgccagtgccaccagtctggactcgatggccacgctctcatccgcagcccggatgatctctttcactctggacagctcgtaatccgtcttctctgagaatccaaccacatacccccgtgtctcccggttgccgcggccaaaaggaacgatcacctccgtgcctacttcaagcgcccctgtaagctgttcggggacccggtagcagaatactctgtccagtttttcatgtgttatgtcgataatgatatcagcgaacatgcgcgccttgttcctccaatatttccgcaatgagcacccggtcgtccatatcgtacttaacgccctttatttcctgatatgtctcatgcccttttccggcaagaataatgacgtctcccggccggccgttttcgatcgcgtatctgatcgcctcttttctgtcacagatcgccgtgtatttcccatctgtcctttctatcccggtaataatgtcatctatgatagcctgcggctcctcaaatcttgggttgtcggacgtgataacggtaaagtccgcaagctttccggatacctctcccatctcaaaccggcgcgtcctggagcggttgccgccgcatccgaacaccgttacgagccgtcccggatcatagtctctcagcgtggcgagcagactctcaaggctcatggcgttgtgcgcgtaatctatcataagggtaaagtcatccgacactttcaccatctcgatccggcccttgaccttcgccactttcagcgctttttttatctcctctgcagggacgtcaaagtgcctgcacaccgcgatagctgtcagtgagttgtacacactgaattctcccggtatatctatctcaacgtcaaaatccatcagcccgctgacgtgatatttgaccccaaggtaccctggtcttgagatatgttccacatccgtggcccttagatctgccttttcagaaaaaccaaacgtttccgtccggcacgtcgcgttacggaatacatcctcaaaccaccggtcatccacattggcgatccccagcctgcactgtgtgaacaaaatgcctttgcagcgcttgtagtcctcaaaatccttgtgttcattcggtccgatatggtcttccccgagattggtaaaaatgccgatctcaaactcgatccccgccgtcctgtgaagcatcagcccctgggacgatacttccatcacgacgctgtcgcacccggcgtccaccatttctttaaaatacttgtgtatcgtgaaggactccggcgtcgtattgctggccggtatggccttaccgcctatcagcgtctcgatcgttccaatcagcccgaccttgtgcccgacgccttccaaaatggatttcaccatataggtcgtcgttgtcttcccttttgtccccgtgatcccgatcaccttaagctgctcggccggatatccgaaatatgcggccgacatgagcgccagcgcatagcgcgtatcgtccacatggatcactgtcaccccatccggcgcctccacctgtttctccacgatcactgcctttgctcccttttctgcgacctcttttacataggcgtgcccgtctgacacggcgccgctgatacacacgaacacgctgcccgggaccactttccgggaatcgttggtcagctctgtcacttccgccttctcgcttccctgtacaacttcatattctaaacgttctaataaatcggttaatctcatgttcttcctgcctcctgatttaatctcatcaatggtattataacattaaatattttcaaataccataccctctgtttacacggagacagaaggtcaaacgagggtggatttcccgtctcatatgcggtacaatgaagtcagaatattgaaaggggaatgaaactttgaaagcttatgaacgactgttaaagtacgtggcagtacgtacgccgagcgatgagaacagtgagactgtgccatcctcacagtgccagtttgatctggcaaaaatgctggaagaagagatgaaagcgctggggcttaccggcgttcatacggacagccagtgctatctatatggaaaaataccggccaccccgggatatgaggacaaaactgccatcggttttatcgctcacatggataccgtatctgatttctgcggccatgagatcaaacctgtcatcacagagaattatgacggtgaggatctcgtacttggggaaagcggccgcgtactgagctcagatacattcggccacctgaagggcctgaagggacgcacgcttatcacgaccgacggcactaccattctcggagcggacgacaaggcgggcatcgcagagatcctgacgatggccgagcgcctgcgggatgagaatataccgcacggaccggtcagcgtcgccttcactccggacgaggagatcggaaccggcgccgcacactttagtgtagaggacttcagcgctgaatatgcatatacgctggacggcgacactgagggcgagatccagtatgagaacttcaacgcgtgcaaagcgcggtttgatatcagaggattcaatgtacaccctggctccagcaaggatacgatgatcaacgcaagccttttggccatggagatcaattcacttcttccaggcatggagacgccgaggggcaccgaagattatgaaggcttctaccatctcatgagcatgtccggcgagtgcggggaggcgcagcttaactatatcgtcagggatcataacaaagaattctttgaggcgcgcaaacatacgctccgtcttatcgaaaagaacatgaacgaaaaatggggggaaggcacggtcaaactgacgatcacagagcagtacaagaatatggccgagatcataaacggatgtatgcatcttatagacaatgcaaaaacggcttgtgagagggccggtgtaaagccgctcatcttaccgatccgcggaggcacagacggctgccagctcagttttaagggacttccgtgtccgaatctcggtaccggcggacatgcctatcacggcccgtacgaacatatcactgtagaaggtatggacaagagcgtggatattatcatggaactcgttaagctttatgctgcagggatctgacgcatttaacaaaaccggcggtgcgcagccgccggtttttatcgttctgtcactgaatgctgtattacaattctttgatctcttctttaaatccttcgccgaccacctcatttgattccattatgatcgtaaatgcctgcggatctatgttgtgcaccatttttttgatcgtgtacatctgcttgttattacacgcgcacataacgacatctttctttttcttggaataacttcccatacccttcaggatggtggagcctcttcccgagtattcgtcgatctgttctgccacgtcctctccgtgctccgtgacaataaacgtcatcttgccctcatcgatcccgtacatgatcctgtccatcacaatggccatcagataggtcacgatgataccgtatataagaccgtcaacatccttgaagacgagcacacttccgagaatgatcgtcagtatgtcaagcgcgaaggttatgatgccaagtgtcatgtgcggtctcactttcttgatcgctacgctgataaaatcctgccctcccgtcgatgagccgcgcataaatatcatggcgtagccgatgccgcacagcactcccatacagagcgcggccagcagtctgctgccctcatatacaggcaggtacggcgccacatagtccatcagaaaagaagatatgatcatagatttcagcgacttcaggaagaaattacgtcccaaaaacttatagcagaaaatcgccaccggtatattcagtatgatcgtacccgcgccgaccggcagcccgagcagatggtacatgacaattgcgatgccggagaaaccggccacggggaagttcgcgttcagagcgaaattatatacgcctatggcgattaccatgcctgccgcaatatccacaagaatatcgatcccggtctctttccagttaatttttttcatcttcatttacctctctttccttgtttttatcttttacgtctgtccaaaaagtttggacagcctgattttacacacaaaaaagcagccacaaactataaatatataattcgcagctgctcttatgcttataagtatatccacagattatttttttgtcaacaccattctctgcattattcaatgcgtttcgttatctccctgttccttgccgtgagcagcttccagtaatctcccccgccggaccgcgtccctgccatacttttttttgatctcatccagcgctctgtcaagcttcttctgcttctcgtctctggctgtgtccgtctcttcactgctgcggaccgggatgtcaaaaatagtcatctgctcaggctcatcctgtttcaccagtttggagctgcgtatgccaagcagacggatcggcgcttttgtccacagttcccggaacagttccaccgctgtgtggtagatgaccgtatcgctgttggtcggctttgggatctgtctctgatgggaggcggtctcaaagttataatattttatctccacgctcagcatccccgccttctgttctgcttcgcgcagtcttgctcccacgctctccgcaagaccgaggagcacctttttcgcctcttcctccgtcacggcatcctttgaaagcgtcgtggaattaccgatccctttcgcctcaaccttttctgttatcacttccgagttgtcgattccgttggcaaactcccacagttttctgccgtggctcttcagatgaagctcaaggatctccggatctgcctgggccaagtctccgatgctgcgtatctccagcttctggagcgtctcaacgcttgactgccccgccatgtacagctcccacaccgggagcggccacatctttacctttatctcttctgggaataatgtgtgcactttgtccggcttctcaaaatcagaagccatcttggcaagaagcttattcgtagatatcccgatattgactgtgaaaccgaacttctcatatattctgttctttatctccagcgcgcctgagacaggggacgtaaatctgccggatatccctgtaaaatccatataacactcgtcaacgctcacctgctctatatccggcgtatatgtccgaagaaatgtcatcatctggccgctgtactcatgatacagcttatgatccggcggctccatgtgcagacttgcgcacttgcgaaaggcattcgcgacaggttctcccgtccgaatgccgaacttttttgcaggcagcgactttgccagtaccacaccgtggtgggactcctggttcccgccaataatagccggtatggtcctgatgtctgtctctgctccattttttaattgttctacagccgtccagctcaaataagctgaatttacatctatatgaaatacgatacgacgcatgccccaacctcctgagaaaccgcttcctcctgtgctgcttttattctagcatgcagaacatacgtttacaagagattcttccggacgcctgccgcaagtttcccgttttccacatcgatcacgatggtctcccccgctccgatgtctccctgaagcatcagctttgcggccagtgtctccacattcttctgaaggtaccgtttcaggggccttgccccgtaggtaggatcataaccaccctcaacgaccatattctttgcagcctcggtaagagagatcgatatctccttgtccgcaagccgtttatttacatcttccgtcaataaatctatgatggcgtagatattttcctttgtcagcggcttgaacattatcatttcatccagccggttcaggaactccggcctgaaatgtgcccttaagtcgtccatcaccgcattctggctctcctggcttatattgccggcttcatcgattccgtccagcaggtatgccgaaccaatgttggacgtcataataagaatggtattcttaaagtccaccgtacgtccctgggaatctgtgatccgcccgtcgtccagcacctgaagcagtacattaaacacatccggatgcgctttttccacctcgtcaaagagcacgaccgaatacggtttcctcctgactgcctcggtgagctggccgccctcgtcataaccgacatatcccggaggcgctccgatcagtctggatacggaatacttctccatatattcactcatgtcgatacgcaccatgttgttctcgtcgtcaaagaggctttctgccagcgccttggccagctccgtcttgccgacgcctgtcgggccgaggaaaaggaaagagcctatcggttttcccgggtctttgatcccggctttggaacggatgatcgcctctgtgacaagctccaccccttcttcctgtccgatgacacgcctgtgaagctcatctgccagatgaagcgtcttgctccgctcgctttcgttcagccttgcgaccggaatgccggtccatctcgacacgatccttgcgatctcttcgtcggtcacactttcatggacgagggatctctcctcatcttttattttgccctcttcctcctccagctgctttttaagctgcggcagccttccgtactgaagctccgcggccttttccagatcataggactgttgtgccttctggatctccttgttcacctgctctatctcttcgcgcaccttctgtacccgctctactttgaccttctcattgtcccactgcgctttctttcccgcaaattgttcccgaagctccgcaagctcctgctgaaggtgtccaagcctgtctttactcaggcggtcctcctctttcttgagcgccgcctcttcaatctccagctgcatgatcttccgctgcagttcatccagttccgccggcatggaatccagctccgtcttgataagcgcacatgcctcatccacaaggtcgatcgccttgtccgggagaaaacggtccgagatataccggtcagagagcgtggctgccgccacgagggctccgtctgtgatctttaccccgtggaacacttcatatctctcttttaatccgcggaggatggatatggcgtcttccaccgtcggctcatctacgagtaccggctggaaacgccgctccagagccgcgtctttttctatatactggcggtattcgtccagtgtggtggcgccgatacagtgaagctcgcctcttgcaagcatcggctttaacatatttccggcgtccatagctccgtctgtctttccggcgcctacgatcgtgtgcagctcatcgatgaacagtatgatcttcccgtcgctgttcttcacttcctccagcactgccttcagacgttcctcaaactctccgcggtatttggcgccggccacaagagcgcccatgtccagcgaaaatatcgtcttatccttcagcgcctccgggacatctcccctcacgatacgctgcgccagcccctccacaaccgccgtcttgccgactcccggctctccgataagcacggggttgttttttgtcttccgggacagaatgcggacaagattgcgaatctccgaatctctgccgatcaccgggtccagcttctggtctctggcccgttccaccagatcagagccatatttattcagcgtgtcatacgttgcctccgggttatcgctcgtgactttctggcttcctctcaccgttgcaagcgcctgaagaaacagatccctctttattccgagctcccggaagatcaccttcaattctttgttcggatatttcagaagagagaggaacaggtgctcaacagacacatactcatcccccatctgctttgcctcatcttctgcatgaatgagcgctttgttgagatcctggccgacaaaagcctgaccgccctgcaccttcgtgcgcttgcggagtccttcctccacacggttgataaagacggtcttctctacacccatcttttccatcagtttcagtataagactgtcatcctgcacgagcagcgcatagagcaggtgctcctgctcgatctcctgattgccgtactccattgcagtgcgctcgcagtcctgcacagcctgaagtgatttctgcgtaaatttatttatattcatagtgactacctcctcacctgcgtagttctttatttgttctattcgtactataacaaatattgtcagcactgtcaagcctcgagtgctaattgaattataaaaaaattgtgaagcttcatttttcaatacttcacaatcttttccgtacctttttcataaatctttttttacatccgtgagcataaggcggatagagatggatgaccgcagttccccctcgtatattttgttccggcgcagataaacttccaccattggaaattcttttaagagtttttccttgacgaggactgcgcagcgggcgtactctccctccctgagcgcctgtatgagcgcatctgtaagctgtacatctgccagttccagttttgctgtctcattcttcgacccccgcagaggatagccccagagaaacaggccgaatatcctggcatatatttctctcacgctcgataacgtactataccgcgccgtccagatcagcatgtgccagagcgactttgcgcactgacctgtattcctgttttcctccagacagtcaagcagttcttctctctcactttgcctcatctccacaagaagtctgccgagtacctcctcgcaggaatagatgagcaattcaaaagactggaagaaaagggcaagattctgccgtacggccagacttgacaggtcaggttcccggcagcgctcccccatggaaaagatccgggtcccgaccccattgacagactctgcggcccctacctggtttaacacattgatggtccggcgcaccgtgctgagcgacacattgaatctctgcgccatcttttcataggaaggaaggtattcctgctctctgaactctcccatgtagatctcatataatatacggatcgccagactgcagcagagctgaggacgttcgcggtagatcctccacacaaaagagacctggtctatcccgggcctgcgccggacgatcggttccagataggcggccaccccgctgacgtcgcctctctgatattcaataagagaattccgcgcaatatcccactttttttcctgcgccgccacaagaagtgtgttcattctctgacggaccagttccgcgtcatagcagaactgacactgtttcatcctggcaaacgggaatccccagaacaatgtgatttcccaaaaaagattcagggccagaggattctctgccttctgcagtatataacggaaaaactgcatcagatcctcggcaaaagcccgctccgcaagcttacggacatactgaaaatcttcagggaccatccggcgcattccttccatcattatgggaacaagtataagttcagatgattcatagagatcaaaaaaagcttcccaccgctcggaataaaaatgtactgcgaaatcgccgaactcctctttactctgctgaaagataactttcgtcgcctgcccgttgcgcatcgagatatagccctccgaccgcagccggcgcaaagcggccttgacggtctggtcgctgacattaaattcacggcacagtatgtcgatggcgggcagcgtatcgccgtatcggtaatatccgaaccgaaaacgcagaaaaaagtattcatatatcagattagaaaattgtgtgccctctttcaactctgttgtctctcctttgtatatagtaagtattattttatcatttttccaaataaaatactataagtccattgagaatcgtcaggtgatatgttatgctttaaagaagataacatgaacaaggttgtgatggaaaatacaatacattaggaggattttttaaaatgacagatcaggggaatgaaatcttctcagaaggcagcactacaaattttactccggctgattatgagtacagcacacttatgcggcttttaggtgtcagcgtgagcaagcatctgctggatgaacattttacgcttgtctgggccaatgaattttactatgaattcacaggctggtcaaaagaagaatacgaggccacatttcacaaccgccctgacctgtactataagaaggatccaaaggaatggcaggaacttacaagtgtagtttataacgctatcgcagccgggaaaaaaggatataaatttctctcacggttccggagaaaaaacggagattatatctggatacagctttctactcaattctcggatgagtatatagacgggcatcaggtcgcctataccgttatgaccaatatagacgatgtagtgcgtatgcagaaagagcagtctgtcacctatgaaagtctgcccggctttgtggcaaaatacagaattgacccacatctcaacctgactcttctggagggtaattcccggtttatggaatattttggaaccggtcaggacaatgacaactcactacataaggaaaatatcacaaagaatctggatgtcattctgtcacagcgtgaaaactttctgtcaggcaagcctgctcattttgttatgaaagtgcagagccggacgggtcagctgctgtggctgcaggtcaatgcctcctgcgtggactggcaggaaggatgcccgatatatctggcgatctttattgatatcaccgatatcacagaactgcgtcagatgcagaaaaaactgacagaacaggcagacgccctcagagatgccctgtctgtcgcagaacatgcaaaccaggcaaaagcagactttctctcacggatgtcccatgagatccgcaccccgatgaatgccataacaggtatgacgactatcgccgcggctaatataaacgacaggcagcgcgtcgccgactgtctggaaaagatcgcatcttcttccaaacatctgatgacgctcatcaacgatgtgctggacatgtccaaaatagatgccggcaagatgaaaatagcacatgaaacgttcgacctgcagaacgtgacggaatctatcactgccattatatatccgcaggcagacgccaagggtctgaaattttcagtgccgcttgtggacattaccgacactgtgttgacaggcgatgcgctgcggctgaaccaggtgctcattaatctgttgtccaatgcacttaagttcacaccggaaggcggtgccgtccgtcttgagatccgacagctccagaaaaaggccggccgcgtccgtctccgcttcaccgtgagcgataccggcatcggtatgagccaggaatttatgaaacatctgtttacaccttttgagcaggagagtacagctgcaggacgatcagcaggggggaccggtcttggcatgccgataacgaagaatctcgtcacactcatgggcggaactgtttccgtcagaagcgagcctggaaaaggcagcactttcatcgttgaacttgacttcgatctgcctgacggcaggagcagtgaactgccgcagatgcgacagactgtggaatccctcaaggtgctcgtggctgacgacgataaagacagttgtatttacacggctctcatgctgaagaatcttgggatcgagtccgactgggtactgaccggccgggaatgtctggaaagcgtccggcgcgcccatatggacggcgcagactatgatgtatgtctgatcgaccttaagatgccggatatgaacggcatagaagtgacacggcgcatccgggaactggcagatacggatacgactatcgctatcataactgcctatgactggagttccatcgagaaaaatgcgcgccaggcaggtgcagacgcttttctatccaaaccggtttttgcctccacactctatgacactctgctgtctgccactaccggggccaaaaagatcatcatgttcccttcttccgggatagaaaagcactggcccgaactttcaggccgccacgtcctgctcgtggaggacaacgaactcaaccgggaaatcgccaccgaactgcttaagatgacgggcgtcatcgttgactgcgcagctgacggcagacaggcgtttgatatgtttctggagcacggagaccgttatgaccttattcttatggatgtacagatgccggtcatggacggatacagggccaccgaagcaatacgaaactgcggacatccgcgggcagcaagtattcccattatcgccatgactgccgacgccttccacgaggatatcgtaaaagcgggggatgcgggaatgaacggacatcttgccaaaccgatcgaccaggaacttctgtataagacactgacagatatcattcccaaagtttcttcctgatcttcatactgttactacaatgaatatacccacatagcggcgatctggtcctgaatctcactgaacttccatgtgcggctgctgttcttccggctgaacgggtcatttatcgtcacctcaccgttgttatagcctgtgagcacgataaaatgaccgttatccgtaaagtcacccggccccacactgcagatcaccgggtggccagcctgaagttcagccgcgatctgctgttccacaagcggaagctccttcacagacacattccagttcgccggcgcctcttccataaaacgccagtacgtattgttttcctcatccacatatccattctccgtaccgtaggccgcaaccttcgccggggtgaccgaccagtcccccgtgagaccgctcaccaccatggaaaggcacgtcggaccgcagccgctcacagctatgatactcgtaccatagggcgcatatccccaccgctcgtcccactgaagcagcggtggtatctgccccttcacaaatcccgcgcctatattatctgcgtatggcgcgtcttttttcttttcatattcttctacaaattgaaccgtctcctcattcttactgagcagttcgataacgcctttcggatacccggctgccgacgcctgcttctttacacgggcgagacgttctgctgccgtctcctcctcaggttctgtatttttatgttctgttttctgttcatccttctgttcttctttttcttctatctttgccgctgccagcgcctcatcctttttagaacgttgtgtgctgaacccgatcaccgtcgccgcgatcaatacgacaaagccgccaagaataaccagctgtctgcgcacctgctgccttctccttctgttgtttgccatgactttcccttcttcgcatgtatatttcatgaactttatctgtccatcaccatttctttttatggtgattattatacaataacgctaaagccgccgcaacttaatacaccttaagattttattatgttccggccggacgggccgtataaagtaagacgttaaaacggtggaaccccctgtatatatggcgcttccagagcatcacacaactgtgatccgggcagataccgcgcggcggattcccatatattaccggctggtttctgccatatcaagtaaaattacgcagatataacagccggctgcccgttgaaaatggacggattccatgatactattgtgacaccggcagttacgtattacaatttgacaggaggtttatatgaatattgtatttctggacgccaagacaattggcgatgacattgacctatccggatttgaagcgctcggaacggtaaaaaagtatcccttttccacttctgaacaggtgcctgagcgggtaaaagatgcagacgttatcattataaacaaagtgcagatcaacaaagccaccatcggtgacgcccgccgtctgaaactcgtctgcgtcaccgccacggggacaaacaatctggacaaagaatatctggacagccataatattgcgtggcgcaatgtagccggatactctacagagtcggtggcacagcacacatttgccatgctgttttatctgcttgaaaaactgcgctactacgatgattatgtcaaagaagaccgctatacaaacgataccgtattcactcattttgaagaagtgttttacgagttatccggcaagacatgggggatcataggacttggcaatatcggaagacgtgttgcctccatcgcagaggctttcggggccgaagtgatctacgcttccccatcagggagcgcaccccaggaaggctatcatcaaacggatatggacacccttctgcgtagctcggatatcatttcagttcatgccccgttaaatgaacacacagaaaatctcattgattcggataaattgagcaagatgaaaaaaagctgtatctttctgaaccttgggcgcggccctatcgtcgtggaagaagacctgtgcagcgcgctggaaagcggtgacatcgcggccgcaggactggatgtcctgcgcgcagagcctatgagtcccgacaatccgctgcggcggatcaaagacagccgcaggctctttatcaccccccatgtggcgtgggccagtgtagagtcaagaacaaggcttatgaatattattctcggacaaataaaagagttctgggcggattaacgcccggaactctttattttttcagctttaccttttttacctgctccgataattccctcaactcttccctggacatctcctcgagatgttccagtttatacagaaattcttctgcgctttccctggcgcggatcttgacgacctccatataatagctggccacgacgcccggtatgagggcaaggacgatcactccgtagatcccaaggacaatggaagcggtccttcccagcaccgtcacagccgtaaaatccccgaatccaattgtcgtcaccacggagaaacagtaccagaccgattctccaaaacggtggatccccggttccacgagcataataaaaaacgcgctgacgagaaaatacaccccaaatccggccgcgatcttatccgtattcgtccgctttaagatcgaccagaacacccttccttttttcatacgcacctcacaggggtcacgccccttttgaacggggcccggcccctgtcaataattttcccagagtcataacggccagtcccgccacgatacatagatctgccagattcacggtgagtctggacagaaaaccgcttttgcttttgaatcctatgtaatctatcacctttcctctgacgagccggtcaaatatattgctgtatgcgcccgcgctgaatatggccgtgccggccttctccacgcggcgcccctttttcccggacagcagcacatcgtatatgaaaagcactgctcccaaaaaggcggccgatcccctgaccagccatggatatctctccagcgcatgcagcataaatcctttattatacaccttgcgcagtatgaccttatctttgacggcctctttttcttccccgcagtccatgttctcctccacgtactgcttcagcagcagatccacgccaaacaggagcgccgctatgcctgcagacagtatgatcatctacacttctcctctgattcttgaaatctcttcttcctgtttttctatctgtatatcgcgcttctcgatctcctcacagagcgtgatacagtctgtatcattgatctcacccttttgaaatttatcatagatcatccggccgatgtccatcaaatctctttcgctggcccgcctcagagtacggatatcacttttacgcctctgaatctccagcgtatcttctgtcttctttccgatgtcatttgccacatcggatatcctctttcctaaatcctcaaaaaaatctgccatatctgacgctcctttgtccttcattttgtcttatcatcacagccgtctcagccggtcaagtgtctggtacagatccagcgttccgtatccccactgccggttcgggtattccagtaaaagcctctgctgtgctccaagcacgaacagatttctgatctcgcttgtgccgaccccaagattctccgtctgctctctcaccacccattctgccagaagcgcggaggcgccggcagttatggccgcggcaacgcttgaacctgttctctttgtaaatctgccccccggcacggcgccggtcacgcccactcccggagcggcaaagtccggcttgataacaccacctctagtataccctctcccggaattaatatcaatactattgtctgttccgttatagtaggccactgtcataccgccgaccgtgctgcccggttctgtgatggtcgtctccgggtcagcctccaggaaaaatacttcccccgacaaaaattccttcaaaggcagccacagatgaaacacaccgtccgaaagctggagcggctgcacaacaatcctccagatcccctccgacggcccgtcaaagcgcataaagataagctgagagtcgttgttctctgtcagcagcctgtattccgccgtaactctcgtctggtcaaaggtaaacgtatatacgtatctgcttccctggcggatcgagatgaccggcgtccgctcgccggaaggagacacgatcgaaatggtcatcagattcggcacagaagtccacagctctgtcacaaagcctcctacgcccgcgcccacccgtatctcgacctctcttcgttctcccatatcctcaaatcttccggagaaatgatgccgctggttcgcctcatttccgtttccgatcaccacgattctgtccatagtcatagagtaactgttcaatatgctcgacagaagcgtcgcgctgttgtgccccccgaagttcgtaccgagagcaatgcatatgacaagaggcatgtttctttcctccgccagcgtgctcaaatacctgagcccgagcatgatgtcattttcctgatagcagactgcctccggatcaatggaataaaacgccttcagataatcttttgcttctttcagtttaacaacggcgatggtagactcgggcgccgcgccgagaaactggttttccacgtccgcccctcccgccgccacactggccagaaatgtaccatggctgttcgtgtccacggttggaacaagttcctccggcgtctctgaacggagcgcttcattgatcgcttcttccgtgtattcacttccgtatgcaaattcctcaggcggcgtgccgccttggaccgtctgatcccagatccccgcgatgcgcgtgctgccgtccagattgcggaatatcggattcttataatcgatcccggtgtccacaaacccgatcattatatttgctcccatcagctgcagcgcgggataattctgggccgcggtgatgcccgactcattcagtgcatccatatcaatgagactgtagcagttggggatagagttgtaccagtacctctcaatactcaaaggttccattccttcgctgtttatgtatatggctttatatccgtaatccatattctgtatacaataccggtcatcctgaatccccatatcgctgaggctgcggtacccgggaaaaataaaatcccagtacccctgggatagtatctgttcttggcacgtttctctgtccataaaaaatcctcatatactttttaataaagtatatgaggaaaatatacatctatgtacaccgcatttttatttttcttccccccgcagtatggaggcgccttcatagtaactggagacttccttctccttggctaccggaagatccggccccttcttgaagatgatcttcagcaggatcggcgtgatgatggtcgtaaatacaaccatgatcacgacagggccgaggaaggcggaactcataagtcccatggcagaacctttgctcgccacgatcagggcaacctcgccccgtgatatcatgccgacgcctatccgcctgcactgatatggcttatagccgcatgctttggctccgagcccgcagccgacgatcttcgtcagcaccgcaacgagcataagcagcagggaaaaggcgacgatcataccgctcatcttcggaagtatgaccttcagcccgatactcgcaaaaaacaccggggaaagcagcatataggaaagcgtatcaaacttcgtctgaataaacacagaccgctccgtattggatatgatcaggcccgcaataaacgcaccggtgatatcggccaccccaaagtattcttccgcgatatacgccatgagaaggcagaacacaaacgcgatgatgacatgtctgtgcagtcctctggacgcgccttccgtccacgccttgtacaccttatagaagataaagccggccacgccggagaatacgaaaaagccggcgatcttcagcatgactgtcccaatatgtacagaagggtcggccatactcgtaacaaccgtcagtgcaataataccgagtatatcgtcgatgatggccgctccgagaatggcattcccggaacgtgtcttaagcttccccatctccttgagcgtctcaaccgtgatgctgacggaggtggctgtcagtatgatccctataaagatattctggagaaaaatgctggcatcggcatcagacgcaatcatgtccggcctgttgaaaaagtatgccagtccgaaccctcccgcaagcggcacgagcacgccgcacagcgcaatgacgaaagaagcctttccgctcgctttaagctcctgtatatcggtctcaagacctgcgcagaacatgagaacgatcacgccgatctcggcaacctcatggataaaactcgtctccgtgagcactccggccaccgccggcccgagcagaagtcccgcaagcagcgcccccacgacctgaggcatctgtaccttccttgtcgccagccccagaagttttgtacacaataaaataactgccagatccagtaaataactataactattcattatctcaacctcatggcttcctgtcctctgagcatgatgacaggtcctcccgttccttctatgtattcttttgtgatcgtcacttctccgatattgtcatccttcggaatctcatacatgatatcaagcataaattcttcgataatggcacgcagcgcccttgctccggtatctttttccatcgcttttcccgcaatggcctgcaaagctccctcatcaaaatccagcttcacctcatccagcgcaagcagcttctgatactgcttcagtatcgcgttcttcggctcttttaatatcttgacgagcatatcccgatccagcccgcgcagcgtaaatatgatcggaagacggccgataaactccggtatcatcccgaagttgcgaaggtcttccacggtaaccttctcaaggatcgtcttgtcgtggtcatatttgtctttcagatccgccccgaatccgatggaagactgcttcgtcagacgttcttttataataccttccagatccggaaatgcccctccgcatatgaataatatatttctcgtgttcaccgtcgtaagcggcaccatggcgtttttgctgttcgcgccgaccggcacttccacgtcgcttccctcgagaagtttgagcattccctgctggacagactcaccgcttacgtcccgctggctcgtgttctttttcttggcgatcttgtcgatctcatcgataaaaataataccctgctccgccttctccacgtcgttgtccgcagccgccagaagcttggatacgacactttcgatatcgtcccctatgtagcccgcctccgtaagagaggtggcgtccgtgatcgccagcggcacatcgagaagccgcgccagcgtctttacaagatatgtcttgccggaaccggtaggtccgatcatgagcatattggatttctctatctctatgtcatccatcgtatccgttgccactcttttataatgattatacaccccgacagacatgaccttcttggcgtactcctgtcctaccacatactcgtccaggctcgcctttatcctgtggggcgccggaatctctctgatatcgatcaggggctttttgtcctccccctcttttttcttcttgatcttctgctgtttcggaatattctgctgctccatatcggccatgttgaacacctggacgcccggcatgttcataagctggctgtagtcgatctgcccgttgctcatggcgtcaaagctcttctgcatacagtcgctgcacaccgatatattgttcggcagctctatcatcttgcccgcggtgctctccggacgatgacagataaagcagactttctcgtactcatcgtcctcttttttcgtctcttccacttcgacgtcggtaccgtccactttttctatctctgtctcgttcggttcatttttcttatctttatcagacattttttcccttctttctgtcagccctgactttcaccgagcatttccaggaaatctttttcagatatgatgggaattcccagttcattggctttcttatttttggatgatgtggatgtcacatcattatttatgaggtaatttgttttggaagtcacggaacctgtcacctttccgccgaggttctcgatcagttcctttatctcgccccggtttgcaaagtgttccacactcccggttatcacaaagttaacgcccgcgaatctctgctccttttgttctgtctcctctgccggtatcgtgagttcttttaaaaggtcgcggaatatgcgcacatgcctttcatctgaaaaataatcgacaaaggctccggcgatcacgcctcccacaccctggatggcacttaattcctccggtccggcggcaagcattttgtctgtgtcacagccgaattcactgcatatcatcttcgcgtttgccagtccgatgttggcgatcccaagcccgtagatcactttgggcagtgtggtagtccttgctttctctatgctttctataagattgcggtatgatttttccccgaacccttccattttttctatctcgtcccggaagcgttccagatgaaaaatatctgcatactctttaatatacccctttgcgatgaatttttccagtgttgcttcagataatccttcaatattcagcgcgtctctgctcacaaacagagcgaaagacttcagatgctttgcctgacagtccggattgatgcagtacaacgcctttgcgttgctcacctgtttgacctccgtatcgccgccgcataccggacagtgcaaaggaatatctttcacaccgcttcttgtgagattctccgcgatctgagggatgatcatatttgccttatatacttctatctcatcgcccacgccgagttcaagctcctccatgatactcaggttatggacgcttgccctgctgaccgtcgtaccttcaagttctacaggctcgaatatggctaccggattgatcagtcctgtcctggacggactccactcgatctcgagaagcttcgtttccttcgtctcatccgcccacttaaatgcaaatgaatctctcggaaacttggaagtcctccccagtgagcgtccatattccacatcatcatatactaacacaagtccgtccgatggaaaatcgttttccgctattttttcggaaaatttaataacttccgcctccagcgtatcctttgtgacttcgcagaattccaccacttcaaatccctgttctctcagccactccatctgacagacacgggaattatgaaaatcaacgccgtctgcctgtacgagcgtgaacgcataaaacctgacattgcgctttgccgtgatctcgttgttcaactggcgtacagagccgctgcaaagattgcggggatttttgtatctggcgtccacatccgctatctccccgttgatcttctcaaaatctttatatccgatgaccgcctctccccgcagtataagttctcctttgtaggcgatctggagcggaatgttcctgaacactctggcattgttcgtgatgacttcgcccacctccccgttgcctctcgtaaccgccttatacaacgttccgtcacggtatgtgagcacgatcgtcagaccgtccagcttccacgacatcatgactttctggccgccggcaaacttcttaagttcctccacatcctttgtcttatccagtgacagcatgggactgtcgtgcctctctttgggcagttcacttaagacttcatatcctacatttgccgtcgggctgcccgacagcgttattccaagctctttctccaatgacacgagttcgtcatacagtctgtcatactcgtaattgctcatgatctcttccgcgtcctgataatacgccttccccgccttattcagctgttctaccagttcctgcattcttgcctttttctgtctgctcatataatccatttaactcctgctctgtcagttttcggtaagcaccgggtttcaaatttcccagttcgatattcataatacgtattctaaccagacgcttcaccttatatccgagcgcctcgcacattctccggatctggcggttcagcccctgggtaagaatgatcgtaaatatataagtcccgcactgtctgacctcgcacggtctcgtgacttcatcgagccctttctctttgtcgaccagccggacaccggacgacatgcggcttacaaattcctctgtcaccggtttattgacccataccttatattccttctcatgcccgtatctggagcgcatcataccattgatcagttccccgtcgtctgtcatgatgagaagcccttcggactctttgtccagccgccctgcatacgtgatccgctccggatattttaaaaagcggataatattgttctttacccgcttatcttctgtacatacgataccggcgggcttatgcaccgccagtaccgtctttttgtctttacttctaatgcgtttttttccgacgcgcacctcgcttgagggatccacctgcatgcccggcaccgcctttttcccgtccacggtcacgcggccttcttcgatcagtctgtcggcctcccgcctggaacagacgcccgcctcacttaagaatttattcagtctcattatttttcagcactccgcttatactgttatcttccacaaatgtgttaccgttatacaaaaataatatatctgtgatcttattttcttccatcacctgatggatatctccataataataccttgggtcaataattataatctccctgaagaacggcgtcaagaaggggacgagacaattcgcataagaatctttgacaagcagcaggcgttctgtagaagccgcagtcgtcttgaggtcgatcatcgcgtgattgccgccgaggaacatggcatactggtctttttccttcagctttgaagcgtcatagagactggctgtttttttctgttcatccacataattgagaacaatgtccggtgatttttcccctttctccggcacataaatgtgtatcggctctctgtagccctgctcatatccgctcgtggccgaaagcgtaccgttaaagtcattgctcaccgtatatttttcccactttggaccattggcagtatcaagccccatggccttggcgagctcttcatatgcatagcttgccccgagtgttgtccagtgatggtctgtgtgatagtagatatcctcattccggtgtttcttcaacaccttctgaacatcgacccagttgatcttgccgcccagttccttccgtatattttcaaactgctttccctgtgcctctgtctctgccagagccggcagcttgtccgacatgacattggccgcattcgggacaagagcaaagtagacgggaatatccacataagactgctcaaacgccctgatcgcctcaatattttcctctagctgctcttcattgggctttgcaatgtcttccagcagatagtttttctttcctttgaacacgccgttggaatcccgcctgcccataagaagatctacatttgttttcagcgacacccagagatcccttgcggcaaactggtctgatttatacgactcatactgtttcatataccggccgcctgtaacgccggacagggtaaacgcaggcttctgttccagcatacggttctctttctgtgagaactccttgtctctgtgcgcaagattcacgaggcagataacggcgagcatggccagaaacagcagcgcggccgctttttttatttgcacttttctttttcttctatctgatttctgcttcatttcctgctcctaaaacctaaagtataaaaatggattatatgtctccgtcacgagatacgcaatgcacaaaaggaacaagatcccgtacacagtacagttgacggcgatcctgttcttcccggagccgtatacaaaacgttcatacagatcatggacagccggagttgagccgatgaccgcagcagcccacagtacaaggttcgtcacaagcagatagaacccctccttatctgccagtccgctgccgcctccgaacataagcttcagatactgaacagcgctcccaagcgtagggctgaagaaaaacacccagccgatcataacgagcacaatgctgtaaacatgcctcagaaaaccgggcagcctttcaagcacacggtacaggagatatttttcggcgaggaggagtataccatagtacaggccccacacgacaaagttccagctcgcgccgtgccagagcccggtgagcagccacacgacaagtatattgcgcacatgcttccccgtgccggcacggtttcccccgagcggtatatagacgtattctttgaaccatgtgctcaaagatatatgccatctgcgccagaattccgttatacttttcgatatataaggatagtcaaagttcttcagaaactggaagccaaacatcttaccgaggccgagcgccatatctgaataaccgctgaaatcaaagtatatctggaacgtataagcggcacatccaagccacgccgtgagcaccgaagtatccgcggcgccgagggaagtcactttcgtaaatatcatgccggtagtattcgcgatcagcacttttttggcaaggcccctgataaagtacagcgccccgtctccaaacttgccccaggattcctgtcggatacggagctgccgctgtatgtctgcatattttacgatcggacccgcgatcagctgaggaaacatacttacatacaaggcaaaatccaggaggttcctctgcactcttacatttcctctgtacacatcgattatataggacaatgtctggaatgtgtaaaaggaaatgccgatcggaagcgccagctcccggtaaggtatgtcgaccggcagtacggaattgatactgtcgagcacaaaaccttcgtatttgaaaaatccaagaatacacagatttacggcaacattaaaaatgaggctcttccttgcctcatgcctgttgttcagatgtcttgcaatatctagtccgctgatatagttaaacaaaatagaaagtatcatgagaaaaatatagaacggctccccccatgcgtagaaaacaagacttcccgcaagaagcaccggattcttgaactttcccggaacaagataatacaagatcaatatgatcggtaaaaacgtaaataaaaatacaatactgctaaatagcatgacttccgtatccttttctataaactctttctgtaggctgtctggacggcatctgcctttccggtcaccgccatcagtacatagtcccctctgctctcaagcaccgcggaactgatcagttttgtctgggcggctccgtagccctcaaaactcttcttctgtgtatccagtcttttctgtgccgccgtctctacaacgtccgcctgactgtcgtcttcaagtcttacgataagcagttccttgacccccatgacatcatcagggatatacaatgtcacacctttgtagtcgtctgcgttcaatccataatatttcttcagatcctgcgtagtacctttcttcatcccttctgtccccataacagaaacgacatttttactcactgtctttatcggcgtcttcgtgccgccttctctggagaccagcagaataacgtaggcggccagtaacagtaccatgccgtatttcaatatattaatgtgatctatcctgacttttttcttatttttcattataaatctgccgcctccgccatgttctcgacccagcccggataatagtccggcgcctggtgaatgccatcgtccgcgtaatactcttcttttacgagccccgtgttgtctatgaagatgacgtctttctcttcacagatctctttcagcttcttattgtattccgggatattgccgtaccactcattattgtccaccgccttcctgccggccggcaggacgcagttaacatacacctttgtatccggcatggccgctttgatctcatccagaactttgccgtaccctttcgcgaataccgcggcatcccctctggcggcttccacgtcgttcattccaaatgtaaggaacagattctgcggttttgcctcctccgccttcctgatcatatcaagcgttcctgtatcttccgccctcgtaacttccgcgcccttttccgcaatgacaagcgactggtccatcaccccgaactcgtaaagcccctgagtgatagagtctccaagcacaagagaattggcaaagcgttcgttgaccgggcggctcttccgctcctcgtccgctgcacgctctgccttctccagctcttctattttattttccgcagcttttaagtctgctttttcaagttcctccagcttcttcgtaccctctgttatatcttcacggggattcataagctttaccgcaataataataccgcctgcgatcaaaagaataatgacagtggtgactgccatacgcagaactttatcttgctcttctccactgccccatgtttttttatttttatctttcactataactgatttctccttcatgcaccatattcccgcgcgccgcatcgcttcgcatgcctgaatatacaaggttattgtaatgttttcaactgtaaaagtcaaacttataatgcattatgcgacagtaattggtataatattactatccgcagtatggagaacagttcagacacaactgttacagccattgtgcgtatataaaacaaaaaggagcgctatccatgatcacactgaccccggacactaagacatgcatgtcccacctgcttttaaaagatacgttcgattccctctctctcatagagggagagatcacaacatacaacaaattctccattgacggacacattcacaaagacttttttgaagacgctcccgacagagactactcttactggcatgaactgaggagttactgcctgtccctcataaaaggaaagcgcacccctctcggatttaagttcgtcctgtccctcggaaaagagaaattcaccagctttctcacggagaacggacttacatttcagccgggagacatccagggcctttatatgaacctgaggtatgacggcacgcgcctcgtctgcgtgacaggcacttccatgaatacgttcacgatggacaagtcactggatgaagcctgggaccggtgggtgcgtacattcttctcagatgcgggaatcgcttttgagggagatatgtgagcctcaaataaacagagataaacggaaagggaactgcgcagccggcagttccctttgtttatgaaatcttttattttgtcagaagcagcatgatctcgttgcttctctgcatgaatgctgtcatttcttccggactcagcggcttgtgtgccagcatggccagatcataaagctgcctgcagatcaccggcacgctttttgcacgtctgtgctctacaacaaacttcacgagcggatggttggcattgagtatgagtgtactctccccgccgaacataccggcgtccatacctgccataccgtacattttcatcatttcctgcatacggcggttctgttctgacagtgtgatcactgctgccgtattgtcgtcctttaatttctcaactttcacatccagtttgtcattttcgagttctttgcggaagatctccacaagactgtctgttatcttctggaactcttctttttcttcctccgcgacctcttctttggccgaatctgtgatatctgcgtcaatacgctggaagctcaggctcggattgcgctgttccatctgtgtgataaacgcggaatcaatgttatggttcaggatgaccgcgtcctgcccctgtgccttaaacagattgatatactggctctgctgctgttcgtccgtcacatagtagatcgttgtcttctcttctttgctctctgcattttctgcgtcttcagaagcagtgtcttctttctctttcggctcttccagcgttccgccgttggcctctgcgcactcttttaatgtcagatatttatggtcaatgttcttaaacagaatagaatctttcatcttgtcgcagaacttttcatccttcagacagccaaacttcacaaacgggctgatattgtcccagcacttctcatactcttccttctgtgtcttgcacataccgttcagtttatcggccaccttctttgatatataatccgctattttatttacaaatccgtcgttctgcagcgcgcttcttgatacgttgagcggaaggtccggacagtcgatcacgccttttaacaccatgaggaattccggaatgacttctttgatattgtctgcaatgaacacctggttattgtacagcttgatcgtaccttcgatagaatcatactctgtattgatcctcgggaagtacaggatcccctttaagttgaacggatagtccatgttcagatggatccagaacaacggctctttataatccataaataccttgcggtaaaagtcgagataatcttctttttcgcattcgttcggatgctttgtccagagcggatggatatcgctcagagataccggacgtttgttgatcttcaccttttccatggcaggagatacttctaccatctccttctcgccgttttcattttccttctcttccattttggcttcttcatggatatgttcaactacaacgtcatcctctctcaagtccgcctcgtcgatcgtctcatattcctgttctgcgtccgcattggagaggaatatctccaccggcatgaaagaacaatacttttcaactacttctctcacacggtactcattggcaaactggacgctgtcctcattaagatacaatgtgatctccgtgccgacgccttccttagtgccgtcttccatctcatactctgtcccgccttcgcttacccagtgtaccggggccgctccttccttataggaaagtgtatcaatatgcacttcatccgccaccatgaaagcagagtaaaaaccgagaccgaagtgccctatcatatcatcctcagtcgtcttatccttatatttctcaagaaattccgtagctccggaaaaggcgatctgcgtaatgtattcctccacctcgtccgcagtcatgccgacaccgttatcgataaacttcagcgtcttttccttcgggtttacgatgatctggatcgatggtttataatcgtcaggtatctgatattctcccatcatatcaagctttttaagctttgtgatagcgtcacatccgttggacaccatctcgcgtacaaaaatatcgtggtctgaatatacccatttctttatgatcgggaatatattctcactgctgatagataaattacctttttttcctgccatttatatcactcctatttttaataataaatgcggccgcttaataaaacgccgttttatcttgtctaacagttataataatacgctgttttttaaaagtcaatagaaaattagcactcttttcaaaagagtgctaacaatcgtattatttctgttattctatgctctttaatgactctaccatatctatccttctgagcttaaaatacatgacccagttgacgatcgcggagaaagccaccgtaaacagaagactgtatatataactcgggaaattgatatttctaccgaacattgccgcatccacctccactgtccggatgacgaacagatgcagaagtcttcccattatcatacctgtgccggcccccatcagtgtcagtatgacattctccctgtatacgtaagccgccacttcaggatcataaaagccgagtaccttgatcgtggccagttccctctgacgctccgttatattaatattgttcaggttatacagtacaacaaaggcgagcatgccggcagatacaatgaggacaacgatcacgagattcagacttttgagcatatcgtcgagctgcttctggatatcgctcatatagctgatgctcagcacgccgtcctgcttcagtatctcctgccccgtcctggcgagcgctgatttggacggatcctctgccttgaagaaataacagttatactccgcaggctttccatatacctcctcatacagaacaggagtcagatagatataatgtcccatataattttcacagaccgtctgtatctttacagggcggtttccgtcttcttcatccttgatatatatcgtatcacccgccttgaccccgagaagctttgccgtcttttcgctcacgacagctccctcatcggtgagcgtatattttttatggctccttctgtcccggaagttgatgaacttctcaagctcctttgccgacccgggaacaacttcatacgcgtctctttctctgccgccgttcacgagtgtcacattgcgcatattgacctctgtatactgccggacatctgcattgtttttcaggaaatcctccacttccttctcttttgcttccggaatattttcttcaaggtaagccatgccgtcgtacacctgtatttcactgtactgcagttcagatatggcaaacacggaatccttgattccgaacccgacgagcatgagcgccatacagcctccgatgccaaatatagtcataaagaaacgttttttatagcgcatgagattgcgcacggtggacttccacgtaaaactcagtctcttccagataaaggtgacgcgctccaggaatacccgctttccgtttttcggagcgggcggtctcataagtaccgccggctccgcggaaagttctttataacaggcggcaagcgttgcgcccatcgtgcaggccagcgccgcaagcgtcgctgccgcggcataagtaagattatacggcgtaagaatatccgggatatgatggtacatgatgccataggcgtatatgataatataaggcagcactttctctccgagaagcacaccgaatatactccctccaagcgtggccaggagcgcataaccgagatatttggaggctatggtcagcttattgtacccgagcgccttcatcgtcccgatctctgtccgctgctcttccaccatccgagtcatgctcgtaaggctgatcagcgccgcaacgaggaaaaacagcacgggaaacacttttccgatcgcccgcatccgatctgcgttgtcaccgtaaccggcatactcagccagcgtattccggtcgtacacataccattttggatccttgatcttaccgatctcatcctttgcatccgcgatcttctgctcaccgtcggccagtttctgctcggccttctctttcgcagcctcgtactccttccatccgtccgcaagctctgcggcgcttgctgctatctctgactccgcgtccgcaagtgcggcttcctgcttctcgatctgcgcccacccgctgtcgatctgcgcctggccgtcctgtatctggctccatgcagacgaaagcgtggcctcactgccggaaagctttgtcttcgtgtcatttaactgtgccgcgccgctatccagcttctgctcatagaccgcaagcttactgtccgcatcttttctggcagcatcgtacgctttctgagactggccgtacagtgtcctgctttcctgaaggtccttctgtgcgtccggaagcttattgtccctcaggtcattacggtctgcctccgcctgattcttttgggattccagactattatatttctctgcatacttcggatctgttatgtcaagcgcgtccatctcctgctgaagccgggccgctgtgtcctccagatcctttatctgctcctgcatctgtacgacggccgcttcctttacatcgcagagccccttgagctggtcaagcttctctttctgcggggcaaactgcgcgtccacatccgccttctgtctgtcaaatgccgccttctgtgcgccaaaatccgccatagccttctcataggcaatcctgccttcctccagctgtttcctgccggattcatattgtgttccggcgcggtccagttctttctgctttgtggtgagcgttgcttttccttcctccagctgcctgcgtccgtccgcagtctgctccctggcgccgctaagttttgtctccccgtccgtgagctcctgctctgctttcaaaagttctaagtcggcctcttctcttccgtcggccagctctttttccgccctgccgagttcttcttccgcctcatccgccagttcctgtctgcgtatgctgcctctttccccggtgatcgcttctatattgtcctggatctttttgatcctgttctcatacgcatctgtgtaagcggtcagcttctttgctccctccgcctgcacataggcttccgtgtacacatccatgtcaaatgtggaagccggcacaacaaagaagcccgtcaaactccccgttccgatcgttgtatttccccggttgaatgaaatataacacggactgttccccgtacctacgacggtcagcgtatcggtcgtgagcgtatcggtgactttcgttccgtcacccgacttcagcacgaccgtatctcccactttataatgcatctcgtcatctgccagacattcacccggtttttccggaagacgtcctttcgtcacagccaccttgttcatggacgggagcatggacatgacatgtaccgcgatctcccggtcttccccctgacagagaaaatccgcgctgaaaccgccctccgcccgtttcacgccgtccaccttcccgatggagcggatgtcatcctctgttattccaagcgtactgacggtcttgatatccatcagatccgccccgtcaaaataagcgtcccccgtagcccgcatatcgggctccgaagaacgtattcctgaaaagaacgcaactccgagcgctacaataaagaaaatcgaaaggaaccgcccgaggcttctgcgtatctccatataaaaatctttgcgcgttgcctttgtccccatttaaattaccctaccactctatagaatctaccgaaacaggtttgtcattttcgatcattctggacacttttccattttttatctttatcacacggtcagccatcggtgtgatcgcctgattgtgcgtgatcaaaataacagtcattcctttttccctgcacgtatcctgcagaagcttcagtattgatttaccggtgttataatccagcgcgccggttggctcgtcacacagaagaagcttcgggttcttggcaagcgcccttgctatggacacccgctgctgctctcctcccgagagctgggccggaaagttggaaagccgctccccaagccctacatcccggagcacttcctccgcgtccatagggtctctgcatatctgaagcgcaagctccacattctcaagcgcggtgagattgggaatgagattatagaactggaacacaaacccgatatcgtctctccggtatgcggtaagctgcctggcattatatccggatatcgtttccccgtctacctgaacacggccctccgtggcagtatccatgccgcccagtatattgagcacggttgtcttccccgcgccgcttggccccacaactacagcaaattctcccttttctatctggaaatcaatgccgtctgcggccacgatctccacctctcccatatgataaactttccgcacgttatccaacgtcacaaaaccgctcatacaagtcctcccaaacatgccgcattttatgacaggaactgtaaataaagggatcctgccaactaaaaataaaattcattattgtctgtttttattatatcacttataataactcatgaatactattgattttaagttgacaaagagaaagaaacaggagtgatcaagatgagtcagacaagattggtcccggccgtaacagacagtgagatacatgatatcgccgtgcttgcggaagagatctggcacgaacactttacggacattatcggggaagagcaggtaaactatatggtagataaattccagtcataccctgccctgaaagaacagatccagaacggatatgaatattatcagatacacagcggctccacaatggcaggctataccggcgtccacgaagacgacggcgcgctgtttttgagcaagctctacataaaaaaggactgccgcgggcagcgtcttgcctctgaagccttccgttaccttaccgctctctgcagaaaaagaggtctgtccaggatctggcttacctgcaataaacataacgccaatactctggcggtctacagccatctcggcttcagcataactgatgagcaggtggcggatatcggcaatgggtttgtgatggatgattatatcctgacatatgaaatggggatttagttcaaaacagaagacatcaggggccggaatcttccgaatcccgtgatgtctcttattttatgatctgatcttataatgctttcctgtaaagttcttccacatccttcacagtcgtctgtctcggattcgccagtatattcccgctcttcatggcatcttttgccatggccggaatcgtctcttccttcactcctacttctgacagtgatttcgggattcccagatctgcgttcaattttatgacctcttctacgagcatctccggctcaaatctttctgcgttcccgctgctctcacggatatagttatatatcacttcataacgccccttatccgcaagcgcgttgtaccggaggacggtcggcagaaggatggaattggccacaccgtgtgcaacatggaagtatgcgcttaccgggtggctcatggcatgcacattgccaagtttcgcccacgcaaatgcgatccccgcaaaattacatcccgccatcatcgcacaggccgcatcttcatccttccggttcgccacaaaccgccggatattacggccgatcaactccattgccttttcagccatcgcatctgaaaatggggtggcttttacagatatatacgcttcaatcgcatggatcagagcatcaaccccgcaggaagcggcgatagacgcaggcgctgtcattatgagttccggatccagcactgcatatttcggaagaatctcataactgatcacggacagcttataattcctcgattcatccgtgatcacagaagaagccgtcacctcgctccctgttcccgccgttgtaggtatggcgatcatcggcacgatcggtcccgggaccgtatcaaatccttcgtaatccgtaatatctccgccgtaatttacaagcaccccgacagcctttgccacatccatggaactcccgccgccaagagcaacgacactggtcgccttgcactctttataaagagccgcagcgtcatttacgatatccactgtcggattcggtattacatccagatacgtggtacatttgatacctccgtctaaaataatgtcctgaatcttctttactacgccaatgctttccagtccgcggtcagaaacaagcagaacattgtccgacttgttctttttcagtatttccggaagcttctttaaactccctatcccaaactctatattctgcggaattttaaaactataatctttcatcacacttatcctccttaaccatgcgcgatcatccgtcgatctgcggttccagcgactgcagcctgcccccggtgcgcctgttgtattcatccataaactctacgatcttgccaagcgtagggcagatcacggctcccgcatcctcaagggcagcgatctttgaccgcaccgttcccatccccccgctcactatcgctcccgcatgccccatacgcttattttcaggtgcgtacatccctgcgatataggcacataccggctttttaaggtttaattctttgatcttggccgcggccatctcttcactcgtaccaccgatctctccgataatgacgatcgcgtccgtctcatcgtcctgtgcaaaatattcgatcacatccgcgtggtccataccgactacagcgtcgccgccgatacctacgcacgtagagagtccgaatcctttgaatgtcagattggacgccgtctcatgtgtgagcgtaccgctgcgggatatgattccgatatgccctttaccataaatatagtcgggcatgatcccaagctttgacttaccgggagagataacaccgatcgtattgggacctaccacctgtgcgtcaagcgcttttgccttgtgtacgatctggagcgcgtccatgaccggaacaaattccgtgatgacggcaagcagccggatcccttcatccagcgcctgaaatgccgcatcccgcacgaactgcttcgggacaaggagcatagccgcacggatctccgggaatacggcacgggcgtcagctacggtctcgaataccggaacgccctcaacagactggccgccctttccgggagctacgcctgcaaggagcctcgctttactctccagtgtacgtttacagtggatacgcccctgctttcccgtgataccgataatcagcatagcggtatcctgatcaattaatatactcattctgcctcgcctccttcaccttgagaagtgtctgtaccgcctcatctgttgtgccgtactttgtctgaggaaaaccaagcttttcatagatagaccacccctgctcctggttgaacccccggctcttcacaacaacgggctttctgatgcccagttcggtgtaagctcgggcaatgccttccgccatatccgcacagttgttgatacccccgaatacattgacaaaaacatagtctgtcgacttattttttagcagaatacacattgcctgataagtcttctccgccgtaacgccgccccctaaatcgaggaaattatttacacggccgccatagtggcggatcgtgtccatcgtcgccatgccgatgccggcgcctcctgccatcgttcctatatctccttttgcgtcaagttccacatacgtgaggtcatgtgcctctgcctccgcttcctgcggagttttttcctgctcagtgcggggaagtatgatatagtcgccctgacggtacagactgttgtcgtcaatgacaagcttcgcgtcaatggcgatcagcctgccgtcctcaagcacggcgagcggattgatctcgatagttgtcgcatccagcgcaaagcaggcgcgggcaagctttcgggcaatatctgcaacctgctccatacgcgcagccggaaggtcaaagactgccgcggccattcggaaagcttccgcgtcaaatccctccgtacagtcaaatcggagcagtttttcaggtgcagccgccgcaagttcttcaatatccattcccccgaacggagtaaaaagcatgatcaccgcacggttttttacatccagcgtcattcccagataatactcctctgaaataggcaggaaattacaggcgatcaccccctccatcgtgtgtccgttgatgctgataccctcaatgatcttcttgacttcggtcagttcctctttagactttacaacacgcactgcccctgcttttccacgttttcctgcaagaatctgccccttgagcacacacggatattcaatgccgtccggtacttgatcgtctgtcaaaagtatactttcattaacaggaatcccaaagcgttccaattgagctttaccttcaatttccaaataatccataggccgatttcctttctgtatgccgcagcaccgcagcttgatacgacgctgcagcaaatacttgataccttcattttacttttatgatcacgtttacagccaggcaagttccgggtccggcagataggactcttcgtacgggtatccaacgcgtgtaatgttcataagatgatcgtaattcaagttcccgctgaagctgttgttcccccatgatccgcatccaagcgtcgtcgtcgcggtgaaaccgtttgtagggctgccgccgcctgttgttccggcaggctgattaacgatcacacgggagaccgaacactgcaaagcggcatattccacgtgttccggagtgttggagtggatgccgatactgtgcccttttccttcacactcaaggttttctaccatcatggcgacaccttcttcaaacgtaccgtacggatagacggcgaggacaggacacatcttctcacggcagagcacgtcgccatgtccgagcgctcttgctctggcaatgatgacgcgggtgccttccgggacgtccaggccgatctgcgccgccaccttctctgcagtaaggccgaccacgtcccggctgataaccccaccgcccggaaagataccctcacgcagccggtctgccagttccggctctgcggcataataaccgccctgcttctccatttcttttataaatgcgtcaaacttttcttccggaatgaaaacagtctgctcgccgaggcagataaggccattgtcaaagctccggccgattatgatcttagatgccgcttccgccaggtctgcgtctctgtccacaatgcactgcacatttcccgcgcccacccccaaagcaggttttccgcttgagtaggctgcctttaccatgcccatacctccagtggccacaatgacgtctgccagactcatgagttttccgctgtcttcgatagagacctgctctaacccaagcacaagatcctcaggaaatcccagcttcgcaagttctgtgcggaacataccgacgaggagcttcgtgcattttacagcccggggatgaggggcgaatataatagaattgcgagtctttaacgcgaatgccgcattgctcatcggcgtcacgacaggattggtcgacgggacgatactcgcgacgacccccatcggttttgcgatctcgatcatacggcggtcttccagtctattgatgatgccaactgatttcttccccttcaggctgtgccagatgagcgcggatttcatgcggcattttgtgactttatctgcctcactgccaagacgcgtctcctcggcggccagaggccctaacatttcagcattgtcatagatcactttacatactgcgcgtgccgccgcatccgcctgctcctgcgtggcaaacgcaaattgttcctgtgctgcttttgaacgtgacaccaatccttctaccgtcattacttccttctgttttgtttcattcatgtcagaccatctccaatcttttaatattattaattaacgaggtacgaaagctctccgaaagccggccagaactgcatggccagataaccgaagataatgaccacgaccatactgatgatcgtcatcggagtgccggccttcagcatcttatttgcgtcaagcccgtaagcgacgggtatcgcgcggacactgaggggaagcagaaattctgcgttatacgccagtgtagtgataaaccagtaaggtatggggttgagaccaagttcactcgtgaatccgaatacgatcggaatcgaaacagctgcggcagttgtgccgtttgtcacttcggaaatgatacgggtaaaaacgaccaggatcacgatagtcagcaggccgccgtccagtgccagtccggaaacgatatccgctatgcgggcagtcgctccagaatcatttataagtttcccaagtgccataccgcctgcaaagaggatcatcattccccacatcatgccattttgggcggtatcccatgtgagaaggaagcctttatccgcagctacgataaagaagcagagacagccgagcgtcagatatacataggcaggcgccagtgccggcaggatatcggcgtaaagaggacgggtaaatgcagctaacatggccacgagaaaaagtatggagcatattttttcgtcccgtttcataggaccgagttcccggtagctgttgttaaaatactctctcgtgccgtctaattttttaaccttcatcggcatcaaaagcatagaaccaagaagaacaagcgaggctatgatgagatatggggcgatgcggatgacccagtctatgtacatgaactcgtgtccggtcaactcttccagataggagatcgcaaccagattcatagcgccgccgagaggtgttccggctccgccaaggctcaccccccatccgatggcaagcagaataggaacggcaggagcacatgtcggaatatcatcataccccgccgccgatagcatcgcgatcgcgatcggagtaaacagggcgcagaccatgacatttggaagagccatagaaagcgcgatgctggccagcagccagactgtgatctgcgacttcatcgaaggccctataagagacaaagccttcagcgccacccgtctgtccaggccgcatgctttccatggcagacagataagtgtagaaccaaagataagaattatactgtcggatgcgtactgcgcagtgacggatgccatgggtacgatattaaagaccgcgttggcgacaaccggcattattcccgtgatcgtgatgtgaacaggacgtgtgatccaccagaagatcagccagaacgcaacacccactgcctgtgcgccgcgcatggtcagtgcatttgacagcagcagaactgtcagggcaaaaataacgggccctgccaggatataaatgaagcgtcgtttaagagtcatgattgattccctcctccgtatatttttaacttgcctgtattatagcgggacagggcggccgcccgcaatacaaagcgccgctttttcccgtgagcgaaacaggttttcaaagcacaaaccagtgtctcacattctgcatattcatttgcatatgatgcaaacatttttcacacaaatgattgttcgcgcaataaaaaaactgccgtaaaatagtttcgcactattttacggcagtttttttaatttatcatttcggataataaccgagcttaccggatattttgcccgcgacagccatcaccgcttttgcaagctcccgctcgcgctgcggctggctgatgctgtgcgcgcttgccgatacgctgacagcggcgatcggaagacgctcgcggttaaataccggcgccgcgatcgagcccttgccctctgtaagttcgttgagaagaaggcagtatcccttctgtttcgtatgaataagctcctggctgatctcccagaggtcaactttcgtctccggggtacgtttttgaagatcactgttcttcaagatatcctgtgccttcgcatacggcatgtatgccagcagggcgcgtcccatggcgcagcagtacataggctgccggtgccccatcgggataaacagctccatcgttctttcggatgaactgctgatcagatgggcgacttccgtcttccgcggaatacccatatgaccgtgcacaccatatttataagagagacgctggagctccgggaacgcatgacgaaagacgtcgttgttctgcaaagcagctcctgccagtgcaacgatctcaagtcccgggtaatagaagccggtggagtcatcacgctccaaaaacccccagtccagcattgtgttcagatggcgggaaactgtactgatattcatatccagcttcatcgcgatatcagaggtacgctgcatgggcgtcgtctcatcaaatgtcgacaatatggcgagagtcttactgacacttttagtctttgaagctttgtgccggctttcttctggctgcgtcatagtatatagatcctttcttcaggaaagtccttaagaccgccctgaatgttgtttaatgtaagaaatctttgttttagtaagtgtatcattgttttgcagattatgcaacaatccaccgtccgtaaaaaagacatggaacataccatgtcttttttgcgttatcgtttaattttctaattagatcttctgttttttcgggcacccggtcacttttttctccacatcttctattgtgacagtctcaagataatccttacactgtgcgttcatctcactatagattccatccatcatccctgccattccggatgctatcatgcagtccatgtctatactgcctgatttccaggacgctttaattacctcttcctccaacgcatcacagacgcaccgcaaggtcactgcacttgcgtccgccgccatgtgatagcctcctttgattccttcttttgtcccaacaagggcctttttcttgagtttggccattacctttctcacacgcgccggattcgtgcagatattctccgccagctcctcgctggaaactaccgtatccttatggcgcagatatacaagggcatgcactgcgatcgcaaattcacttgtcatcgtatttcccactccttttactctcttcctcttcctttgttccaccaaaaccaaacgccagcactatacctataagggttcccatcacgacagccccgaccgggcttgcggtgacccctcatccgccgcttctgcatccgataaatacatagtacgcaaatcctgacgcggcgccgagcagcacaaagctaactcttttcatgtgttttttcatggcagcctcctttccctctttttatggcctttgtcggacacgccttcacacagtcgccacagcggatacattccggactgttaggctgctcccatactttaatatccatcttgcatgtcttccggcattttccacatttgatacagtcgctctcttctacctggtatcggtataacgcaaccgggttaaaaaagctgtatagcgcgccaagcggacagagatatttgcagaacgggcggtatacccacaaagccagcactattatgagcacgagcagagataccttccagataaacaggccgccgactgcgttctgaagcgattcattgagtagtacaagcgggattcctgccgtcagtgtcccgctcgggcatatgtactggcagaaccacgggcttccctgtccgatgacgtcaaccacgagaagaggaagtaatataacaaacagaacgagtatgacatatttcatccacttgagcaccttatgtcccggcaggttctttcttttcctgaaaaacggtatcttatacagcaagtcctgaatcaatccaaaaggacagagccagccgcatatgaaccgtccgaacagagaaccgaagaatatcaaaaaaccggccacataaaatgaaaacttgtagtctctgcttccaagcaccgcctgaagcgaaccgatcgggcacgacccgagcgctcccggacaggaataacagttgagtcccggcacacaggctgcttttgtgggccctgtataaatctttccggtgaggaacccgaaaagatatccgttggtcaccgccgtgaatattatctgaacacacagcctcatcctgtttctgattgcttttatcatcttaaccaattcctatacactccaaacaaatatttacagcttttgtcagcactgttcccgcctccccgcgcgtgatcccgataatgaaaaacagcgcggcggcggtaaacagcacgatacggatccatcttactttacggctgctcattgctgcaccccgttcaacagctcatctataatgcccgcccactcgtctttgtcccgggcgccggaatatacatcaccgacctgatttccttctttgtcaacaaaaatagtcgtcggcaccacattgacagaaccaagtattcctgtcatcagatcctgagatgcgattatatgtgtataatctgcctttgtagtggaaacaatctcttctgccttctcgtctttcgctttccctacgtcactgacaagccccacgatctgtacgcctttgtccgcatactcgcggctcagctcgccaagatcaggcatctcgcggatacatggaccgcagaatgtcccccatatatttaccatcgtaaggtctgctttggaaaatatctcatccgatactgcttcaccttccagcgtctcggactcaaaagtaccgaatatcttcttcgaggctgaagatgacgacgtgtcggaagcttttgacccttcagagctcttggaacttccggcatccgctttctcctccttcccgctgccgcaggcggtaagcagcaacgcaagactcaacgttaaaattgtgatcgctttagctctttttctcttcatcatcgtctcctttacaatctgtaacttttttattttcagttcgtattgtaattatacttgttacagttatatttgtcaatggataaagcagcaaaaaaagtcgagagaaatcttaattttttctttataataagatcaggaggtgaaagaatgaaggaacagatagaggcagttcaaaggatgcagaattatatagccgctcatctgtatgagcagataacgctggcagagctttccggggcatctctgttttctccgtggcattcataccggctgttcaaaaagtggaccaacctgacaccggcggaatatatccggagaatgcggctgtcggcatctgctctgcggctgcgggatgagggctgccggataacggacatcgcgtttgagatgggttttgggagcgtagacggctaccagagggcattctacagggaattcggctgcaacccgaaagaatatatggaaaatccggttcctttatacttgtttaccccttacggcgttatatacagagaaatcagaaaggaagaacagacaatggaacatgttaaaagtgtatttgtacagcctgtcgaaaagcctgtacgcaaggtgatcataaaaaggggagtcaaggcggaagattatttcccctactgtgaggaagtaggctgcgatgtgtgggggcttcttatgagcatcaaatctctggaaggagaacctgtatgcctgtggcttcccgatgcttaccggacactggatacctccgtatatgtgcagggtgcggaagtgagcgcagactatgacggaccggtaccggacggctttgatgtcatcacactgcccgcttccacttaccttatgttcaaaggagaaccgtttgaagaagaggattactgccaggcaattgaagaagtacgggaagcagtcaataaatacgatccgtccgcggccggttatgaatgggatacagacaatccgcgcattcagctggaacctgtcggcacacggggatatatagagttactgcccgtccgcagaaaatagaaatgccgacatgcacagagggagcaggccagccggccgctccctctgttcttttataagtatactaaatggagcgtccagacgcctgacattctataccttccggtgctgcgccgctctgataatccgtgattccctcccctgtattcggatgttttgatgaatacaacgtgtcagcggcatatacacaaagtaaaagcagacagaccggaataagtttcctcgtctgcaccttccttataatgttatccagcagaggggcagccacatatacgatagccatgccgccgaccccgaatacgagcaggccttccgcacagatcctgccgtgaaggttcagaaaatatccggtgtaatcccaccacttctggccattgtgcgtcagctccagataataggacgtaaaatattccacgcagccgcacaggaccactatgccggcaaactcagccgcagggttgatcctgagcctgttgagcacgacaagaataagtacgccgccgcttccgtagatcggaagccatggtccgtgaagtacgccccggttgacaaacgcgccgtcattgacaaggtgaagactcacttcccacacccagccggtaaaggaaaagataaagaacagcatgacgagcgaccagacagaatagtggcgcatgtaatgaatcgtctccactttctgccgtttttccacctcaggaaccggcgacaggcggctcggatagcattttaattccacagcccctttgagtgaatatatccggatccgctcagcctgatcttcttcgtaagctctctcctctttgcttgggaagagcaggataccgagatactctgcaaagaatctccggattcctctcaactgccggatcccttcctctggcttttccagaacagcgatcacatctgcatatacagcctcgatctcaccggactgtgctttttcaaagagatatgtgtcgcagagcagttctgctcccgggatctctttttcttttgcctgccttctcagctgtacgtaatattctgtaaatgaagcagtctgatacagattagaatagaacactgccgacaatccaagcgtgaagatacgcagaatataccagcccgcaaaagtcataccaaatacaaagcattcccacttatggcctttcatcatttttctggacagccttatcgcctctctggccgacacatccggattttctgccacgatatatggaacgagaaaataagaaaatgtcttgatgacgccccctatgacggtaaacatccataaaaacctgaaaacatatgtcacaaacatgacccaggccgctttcgtccattttttaagccgcagcagataaaggaaccgctgtatcggaacagcctcgtagcagcgcccctcgagaaagatccgtcttgatatgacaacgtacagattttttataaaaaaccagaacgcaataaggaaaagcattcccccgataataaagataaaaagtgtgatctcattcgatctgacgagagaattgacggaggccgtcaccgtcacaaacacagagcctgacgtcactgcatttacagcgtgagcgagcactccgcggcttctgcccagcaccggactgccgctttttgactgttctatctgctgctccttgatcttacgggataattctttcccttctttttctcttccttccagaatatcccaggcgacatccatcgccccagcctgctgtcccgcaactccttcaagcttcacggaagccccgggctcggacgtctcctgcacattttctccgagcaggtcaagagtgcctgagaactcggaattgaggaaagccgcgataaggcacactgccacgaacagtatataatgacttctcacattccttttcgccactttcttcatctcttttcttgtcatcattcgtacatacctttcttgcctgattacactttacaacatttctttcagcagtctgctgaccagagcaggatctgccttacccttcatggccttcatcgtctgccccacgagcgcgccgagcgctttttcctttccgcctctgtaatcggccgccgccttcggatcattctctatcactttggagacagcctcccggagcgcaccttcatcgctcaccgtctttaatcctctctcctccacatacagctttggatccacgtccgcttcaaatactttctcaaatacttctctggcaaccgtgctgttgatcgtacctccatctgccagtttgataagctctgccagactgacaggggaaaacgtaatgtcttccggttccatgccgtgctctttcagaaggcgcatggtatcgaccatgagccagttggcagcctttttcggcttgccgcacagcctggtcgtctcctcgaatatatctgccagccgcttggaggctgtgatgatctctgcatcatactgcggtatgtcaaattcttttctgtaccgcttaagtttctcatctctaaattccggcaggcctgcgcggacgcggtctgtccattcgtcgtctatcaccacgggcacaaggtccggctccggaaaatatctgtaatcctgcgcatcttcttttgaacgcatggcataagaatactctttattgtcatcccatcttctcgtctcctggacgacctctttcccgtcttccagcagctcgatctgccgctgccgctctccttctatggcccttgtgaccgccttgaaggagttcagattcttcatttccgttcttgtccctaacttctctgtacccgcctcccggacagacaggttcacatccacgcgcatggagccttcctggagtctgcagtcggacgcgcccagatactgtatcattgtgcgcagcttttccagataggcggtgacctcctgcgcagaacgcatatccggttccgatacgatctcaacgagaggcactccgcttctgttgtaatcaacgagagaagtgtcgtcccattcatcgtggacgagctttccggcgtcttcctccatatgcatctcatggatacgaattttctttctcttgccgccggcctctatctccacatgaccatccctcgcgatagggagatacagctgggatatctgatagttctgcggattgtccggataaaaataattcttccggtcaaacttgcactcccgcgttatcgtacagtttgccgccagcccgatggccacggcatactccactacctgcttatttaacacaggcagcgatcccggcatccccgtacataccggacacgtatgtgtgttgggcgcaccgccgaattccgtgctgcaggagcagaatatttttgtctttgtggcaagttctacgtgcacttccagcccgatgactgtctcatactgttttgacatttttatcctctcccttctgccgcttcttctgtggctggtgcaccggacggcgctgtcctcacatattttttctcagtcgcgcattcgtacgcgtaagccgcgcggatgatattatcttccctgaagcagtccccgatcagctgaacgcctatcggcagccctttgctgtcataacccgcaggcacgcttatacccggcaggccggccaggttcacggaaaccgtgtatatatctccaagatacattttaagcgggtcgcccagactgctgccaagctccggcgccgtcgccggagacgccggccccagtatgacatcatactgtccaaacgctctgtcaaacgcctgctttataagcgcttttacccgcagcgctttcagataatacgcgtcgtaataaccggaactgagcacaaaggagccgagcatgatcctgcgcttaacttctgcgccgaatccttctgaacgcgtcttcttatacatgctgtgaagtccgccgccctccggtgaacggtaaccgtatttcaccccgtcaaaacgggcgagattagagctggcttctgcggaagcaatgacataataagccggaatggcatattccgtcagactcagatcaaattcctccacatgcgcccctctctcctccagcacttccgcggccctgagtacggtctctttcacctctgcgttgagcccttttccgagatagtctcttggaatcccgattctaagcccctttacctcatctgtcagcgcttctgagaaaccatagtgttctctcgccatagaggtgctgtcttttttgtcatatcccgcgatcgcttccaggataacggcacagtctgtcacatctcttgccaccggaccgatctgatccagagaagaagcgtaggcgataagtccgctgcgcgatacggtgccgtacgtcggcttgatccctgtcacgccgcagaaggaactcggctgccggatggaacctcccgtgtcggacccgagcgcaaagctgcactctgccgccgcaacagccgcgcaggagccgcccgaggagccgccgggcacatgatacagattccacgggttacgagtcactccaaagtaagaagtctccgtcgtgctgcccatggcaaattcatccatattcgtctttcctatgacgatgacaccgctttgttccagtctgcgcaccgcttcggccgtgtatgtcggaataaagttttccagcatcctggacgcgcatgtcgtcttcattccggccgtccacaaattgtcctttatcccggccggcactcccgcgagcggggctgtcattgttccctcttttatctgtatttgaacctgtcgggcccgcttgagcgctctttccttatcaagcgcgagaaagccgtgcacatccttctccgtcttctcaatgcgcagaaatgccgcttccaccgcctcttcggccgacagttcacctgcctttattttctttcccagctcaaccgctgtcatactcatgatgtccatcgcttttctatgccccctatcctattgttttcggtactacaaagctgccttccttctgaactggggcattggcaagcgtatgcgcgctcccgtccccattctctgcctcgtcgcttcggaaaacattgttcagcggaaacacatgggacatcggttcgatgccttccgtatcgagttcattcaatgtatcaatataatcaagcatcttttccatatccgctttcgcatcttccttctccgtgccggacagttccagcttggaaagaatccctgcgtattcgatcgtctcgtctgatatcttataagccatctgcttctcctttaatataatctttcatagaattccatataatcttctgacgctatcatctcactcggtacgagtgacagcggccctccgtcggtgcggaccacctccgccccctcagggagcaccatatatttaaagcccataccgtctgaactgccttcccctatataaaggctcaccgtgtcgatctcctcatctccttcgccgtatacggtgacatctgccattccggactcgccggtaacataaatatcatatatgccgggcgcaaagtctgtaccggctgttttcgtttctccccctgcgatactgacagattccgtgagcgggttcggcatttccggctgcatagacgctgtctgcccgttgtccgtgataagcgttaccgtatccttgcaggccactgtcacgaccgccccgtcatacagacgcagatcgccgagataattgtcaccctttccctcatactcatacagataaatattgttttcactgtcttccgtctgaatggtatcaaagtcatcctgcgtccgggcagaatactttccctccggtatgtggacgcctacgatataatggccggtggaaagctcgtattctgcatggtcaccgtccccggaaagcgttctggctgtatacttatatgggtcataagtatactctgctttgctggcgccgccctgcccgtctcccagtttggactcggcccagctgctgatctcttctccgtggtcctccgctacagccagtaatattcctgccactgtcagtaccatcgttataacgcctaccactctgcccgcagcggacttcttcttagcctttgccttctccctgccgcttatcctctgccgcggcatactgtaattatcttcgtaatccggccgcttcatccgctccttctgttctccctgttttttctgtgctttctgctccttctgtgctttctgaggctgaacatgagcatttgtctcatgcacatgtgtcagcggcttcccgtcacagctggtctgattgatcttataatttttctccgacttattgttgtccagaccgcattcttcacatattcccctgctgtctacttttcccccgcataaagtacactttcttccaaacatatggacctccttcacctctctgacatattattatggttccagcctgctcagatctcttgggaacagcgtagtctctctgatgttgtcttcccctgcaagcttcatcgtaaaacgctccaggccgatcccgatccctccgtgcggcggcatgccgtgcctgaacgcctccagatactgctccagaccgtcttccgtcatacccctcgccgcgatcttatcctttagcatcccgtgatcgtggatgcgctgtccgccggtcgtgatctccatgccgcgaaacagcaggtcaaagctcagcgtatatctcgtgtccgccggatcatccatggcgtaaaacggccttttcctggacggatagtgtgtgacaaacacaaaatcactcccccactcttccagggcgtaacggctgatcagcagttcctcctccggttccagatcaaacggattcttgatcttacggccatatttttctgccactttttctttgatctcatcgaagcggaccgccgggatcttcgccgcatacggcagtgtaatgtcaagcgtcttaagctcagcggcgtactctcccgccagcagcgccatggcatactggatatatcccgtctccatcgccatgatctcttcaaaactgtcgatatatcccatctcaaaatcaagactcgtatactcattcagatgccgcttcgtattgtgcttttccgcacggaacaccggcgccgtctcaaatacccggtcaaacacgcctaccatcatctgcttataaagctgcggactctgctgcaggaccgccggcctgtggaagtaatcgaggcggaacaggttggcgccgccctccgcgctcctggcgccgatcttcggcgtatggatctctgtaaaaccctggccgtacagataatcccggaacgcccttgtgagaccttcctgtattctgaacttcgccctctctctgagatttcttaaggatatggaccggtagttgagtttcgcttccagcgatgtgttcagtttccattttgagatgggaaggggcatcatatcatctgccggtctgcccagaactgtgagatgcttcatccggatctcaatgccgccgggagccttttcatttttctccagtattccttctatctcaattgtatctgcttctctcaagtccttcaagtcaaaatccgcggcgccctcctcatataccccctgcagaagtccttctctcttcctgagaatgacgaaagcgaccgtgcccatgtttcttatcgtgtgcaccgctccgtttaccttcacgctctcccctgcctctgtcttgagcagtccgctgatctccagcgtatctttttcttttacacctgttaaaaattccatacacacttcctcctgtccactcgtttatttgcctgaaactattaattttaacaaaaaaacgccccggaatatattgtatattccggggcggatatattaaaatcaatccgcggtaccacccgcattgagcccttctccgtccgacgcctttgtcacacgaaaggattccactcaactgcacttaacgcgtgctcacgtaccgtcctacttaagttcagccggtctgctccagagtgttccctattgtcctcattcctcaagcagcgctctcagccggtgacgccgcatttctgtcaagttccaaagaacagagtctctttcatcgctttgctatactaaattgttaattatactaacataagtatgcccgttatgcaagaaaaaatgaaatttttttatcagaacatatcgctgcaaagccgttccatcttgtcatggaccaccgctctgtccctttcatccgtcatcgtcactatcgtatcaccaaccagcagctttgtccttcccttcgggatgatctcctgagatcctctctgaatggcaacgagcaggcagttttccggccagcttatctcactgatctgtacatcctccagcctggagccctgtctgactacatagttcacgagtatcttctgcccatgctcctgcacaaccttctctccctgctttttgagcagattttcaagcaggctttcatagatcggcttggagcgcagcagagaagccacgatataagccacgatggataccatggacagcgacatcatctggctcagcgagcctgtcatctcgaaaatgagtatgatccccgtcagcggcgcgcgcacgatagccgcaaaatatcccgccatcgcaagcagtacaaaattattgatatacatcggttccagtccgaagaactgaacacctgccgtggcgaacgcgcctccgatatatccgcccagcacgagcagcggaaaaaaaatccctcccggtgcgccggagccgaagctgaccgcggaaaagagaaaccttccggccagaacgagcaatactgtgccgagcagaacatcttcattcgtcagatattcgatgagagaatgtccgcttcccagaagctccggcgcggtaaaaccgagcagtcctgcacagaaaaacggtatcatgatcctgcccgtcgtattcaggcgctttgccttgccgtacagcgcctgcgccttcagcgtaaaccagttgtagaatgcccccaggatgccgagcacgacgccgagcagcaaaataaggccgtaatattcctgaggaagcgcctgtacgatatcaaactggaagaccgagtccacgccgagcacgctagagctcagaaaatccgccgtaagcgacgcggtcatgacagacaggagcaccgagacggaaaagttcttgtgcacctcttccagcgagaacatgacacctgccagaggcgcgtgaaacgccgccgccagaccggcgctggcgccgcacgtgagcagaaacttctcctctgtcttcccgcggtcaagtcctttggacactcccttccctaccatggcgcctatctggatggacgggccctccctcccgagggccagaccgcccagcatacataagaaaccgcctgcgaacttcgcaggcagtaccttccaccacttttgctccagctttcccaccatctcgccttccagctgcgggataccgcttcccgaaatcatcggttcgtatttcagcagtctggccgtgagcacggccatcagcgccaggagcagaaaccatcccgccatgcgcgcgggcgaccgcccggcatagtcaaggatggcattgcgccatgctcccgcgttctcaaggcacatcctgtacaagagaacgacaagacctgcgatcccccctacaagtatgccttcccctatgagaattatctgaaaacgttccgcacgttttatcgtagttgtcgtatctttcttcataatattcctccggaaatggtgctttatcttcctctattatacaccaagttttccaaaggctcattatttttttctgagcattcccgcctttttattgttctgccggcgtatacgtattttccaccgtatccgctgacacaagatatactatctttgaaccgtctgtcccaacatacctccaggctcccgaatcatccgttttcccgacataaatggtaaactctttctcttctcctgaatcgggatcctcgtacactgccttcacggtaacccggcattctccgtccagaccgtagtctttcagtttctcttcctctgcgtgatagtctgcacatgatgtaaacgacaacgctccgaagccgccggccagttccgcaatatcttccttcgcgtcatagacagccgtcttcccattctccgtcacttccactttcttcagactgccgctgctgattggcggcaccgtatctgtctgtacaaatcccgacaggtcaaatgtaagcgctgacacaagcgtactctcgaccgtatacactttcccatcccctttgagcgccgcataataatcttctcccgcagcctggccgatataaagcgtcgtctctgtcccttttgcgttcttgaacgatatagtataaaggggatcgtccagaccataatcagaaagcgcatccggctctttaagctcccgcacggcacggcacaccgtgaccgtatccgcaagatccgccacagcgctctggtccatcggtatctccctgtccggagcatagtaccattttccgtcattttttacgaactccatcgtcttttcctctgccgtccctgtataggagatttctgccgcgtctgtctcgtttgtcacatatactgtggatttatctgtctcccgggcttctctcttcgcagtgtttgtattgtatatgcgcagccccgcatagagtatcaaaagcgcggcaagtatggcccccaatatgatccatgatcttttctgtttcatgcgctgcctccttatgccttccgacgcttcatccagcgcaggaacccatatatgagtatcacggccggaatgccgaatataacgatcatacttatgacacccgcatgccgcatcgaattgtatgtcacttccagacttttcggttctatcgccacattttccatatcctcaaaattggcggacaccgcattggtaaacagcgtcagattctccagggtggaaaatgcttccgtcacctggggatctatgagcgtatccgcggttataacggtaaaccgtgcctcctccccatctgatacggactcagtggaaacagcgcccagcgtatacgttccctgtttctggctgtcttctgtcaccgcatatccgtccgcggacgttgtcatgaacggcgttgccgttatcgtatcgcgcgccggatctgtcacactcatcccgtgcgcattcacgagcattaccatatcggatgccatgccgtccgtcagcccggctgaagaactcagttccgggaatatataataataatttccctgatagctgcgctgcatatcagcgatataaccatccgtccgttccatgccgtactccttcataagcgcatccaggttcggcgtgccgtcctgcgcgtctccgagaagcaggaataccttcccgcccgaggcgagataagatgatatgatctctttttcttccgttgtgatatccgacacagggccgtacagaaacagcaggccgcagtcatccgggatctcatttttcatgataagattcagttcttcctcttccatgttgttcttatccagcaagtctgatacagaagacgagaatgtgctctccccatgtcctgtcgtataatagacttttttgacctcgtcgcccgtcacgtaactgaccgcggacgtgaaccggccttccccgtcaaactttgattctgatacattccccgtcatgtaataggacgactcgtcagagacgatgatatcgctgaacgcgactgttgtacttttctttgtatccttacaggagataaggaccgtatctgccgttgcattgttggccgaaagctcagacgggtgaagcacagggtcgatccattctacttttatttgatcggaaagcgctgtgtacttgcggatgaacgtttttatcctctcatctgttttgtctttctctgcgaacaccttaaacgtgaccggcttgtcgagctttttcaatatgttcctgctcttgtcggatatctcatagatcctgttgtcgctgatatctatattcttcaccttttcgggcagctgtcccgcaataaggtttaccactatcacaattgcggtcacaagcacgatcacccccacacttaagcttccgttgcgggacgccgcgctctgaaataactttttgatcctgtctggcatatgctcctcctaactccagcgtcttttctgtatcatctgcattgtcataaatagaaacaggcccgcgagggacacatccagtatgagactgctgacatcgagcagactgttggcagcgatccccgtcagtgcatccgtcagagaaaaccggccgagcaggctggcaagaagaccctcaagcagcgatggctttgcaagtccggtgacagcacatgcagcggccgcggcagcttccagcgccgccgcaatgagccagttttttgtcatctgatagattccggccacaaggacagtggccaggatcaggatgccggccgcattcccggccgcgcttcccggaagaaaatccatgagcccgctccacagatagaacagaagcagtaccccaaacgctgatatagctgctatgaccggactttccgtcagagaggacagaaacatgccgatcgcgatatatacacatccaatgataaaaaatacaagaatggacagataatccgccgcaatatatgccgtgccctgcgtcatgataatgagcgggaataataaataaatcacacatggtaccgcaaagacagagaccatggccagatatttgccgagaacgatcttccaaaggcccacaggcgccgtcagaagcatctgatccgtcttattctttctgtcttcggcaaagctccgcatcgtcagtaccggcactgctatcataaatacaaagtggatactggacagtacataggaaaaatacggatagccgtagtttaaattaaataccataaaataaattcccgtgaacgccacgagaaaagcgataaacacatatccgaccatcgtatgaaaaaatgactgcagttctcttctatatatcgctctcatctgtctcaacctccccgctttcctgcgtcagctcaaggaatatctcttccagcgtagacttgacaagccgaagttccagaagcggcacgttctcttctgcaaatgccagaaacagcttttccctgatatcttccttctccctgccctggatctgtacagccgtgacaccgtcgtcccctgtgctgtaatctgcagtctctatacaatccagactgtccagaatgctttttatcctgtcctgcggtcctcttacctggatctgtatatatgcggtcctgttcataaggttttccagattgtccggagtatcgctcgccacaagctgtcccctggaaatgatcatgatatagtcgcacacctcacggatctctgccagtatgtgggaactcaggatcacggtatgcttctttgcaagacggcggatcagctcccgtatctcaatgatctgtttcgggtcaagccccaccgtcggttcatccagtataatgatctccgggaagcccagaatggcctgggcaagcccgactctctgcctgtaccctttggagagattatgtatgagcctgttctctgcctccctgagctttgtaagctcgatcacttcctcgatctgttcttccatcttatcttttgggatcctcttcagttccccagcaaaagaaagatattcccttactgtcatctccatatacagcggcggctgctccggcagatatccgatacacttcttcgcctcctcaggctccctaaggatatcatgcccgttaatgagcacttccccttccgtagcgccgatataacctgtcataatgttcatggtcgtcgatttaccggcgccattcggtccgaggaacccgtatatctggcctttcccgacccggaaactaaggccgtccaccgccagatgtttcccgtatctcttcacaagattcttaacttcgatcaatgtcttccctcccggcaacaaaattttctatatcttaaaatatcttcttgaaatctctgtggcgattatatgatttttctgtgaaaaaaacagtgccggcatgtccgggaacacgtgccgtgctccgccgacataccggcaccgcaatgatcaccgggcgatctgcttctttacatacaatgccagacacgaaatcagctttgaatttttcggcctgttcttgttgtctataaatatctccgccagaagctgcggacttccgtgtctgaacatgacatcagcagccgtccgtatattgcgctccacacaggaaacagacgtatgatatttttctgcgatccggggataaatgttcttagatatgtataatagattttcttcttcctctatcgcgatcgcgatagcaagcgtcagataatagtatcccagatatgtactgttcacccccaactgatataaaatgtacttgattttttcctgcaactgcaccatttactacaccacctttacttcctaatattatcactggtaaatatacccatcaagaaaattgacacgacaaaatttgtcacaaattgtaaaattatgtccccttgttaagttatattgtatttatgtccctatatttaatattccaaaaaaaagacaggaaaatatgtataattttcctgcctgtttttcttctattaattctaccttctttcaaggatatatccctttatatttgacatccagtctatcttaagttgggatggttcctttttcaacagactgtccgcaaatacttgtaaggtgtctttaaacggagcgccctgtcctattcttttccgtcaaaacagtacgtgcacagtctgcacggctcaatgccgatcgacgccgtcagatcgtcaagcctgtggtaccgcagtgttgtaaagttctgctgtctgcggatcgcttctaccatctccacatatttacagctgcacggatccgcatattcgtccagcacctcctgcggacagtcttcgccttccttctctttgatcactcttctcgtgataagctccatctctgattttgagcgggagaagttcagatacttgcacccgtacagaagcggcggacatgcaggccgcacgtgcacctcttttgcgccgctgtgatacagaaattccgtcgtctcccgaagctgcgtccccctcactatggagtcgtcgatgagcagcagcttcttattctctatgagagcctgcaccggtataagtttcattctcgcgatcaggttccgctggctctggttctgcggcatgaaagaacgcggccacgtaggtgtatatttgataaaaggtctggcgtacgggatccctgattcgttggcatagccgatcgcatgcgcgatccccgagtccggcactcctgccacaacgtccggatggacagaatctccgtcccgctttgcaagcatactgccgcatttataacgcatttcctcgacatttaccccttcataagatgaagtcgggtaaccgtaatacacccagaggaaggaacatatcttcatctcttcctgtggcgctccgaccgtctccacgccatccggagtgataaatactatctcagccggcccaagctccttaaagtctgtataaccgagattgatatacgcaaaactctcaaatgacacacagaacgcatccggcttatgaccaaccacaagaggagtccttccgaaacggtctctggcggcgtacagcccgtccttcgtcataaggagcagcgtcatggaaccgtcaatgatttcctgcacatagcggatgccttctacaattgatgatttcttgcatatgagagacgctaccagctccgtagcattcacttttccgccgctcatctcctgaaaatgcgtatgtccgtcctcatacacaagctcaagcagatcgtccagattgttgatcttaccgaccgtagttatagcaaaactgccgagatgagactgtatcagcagcggctgaggctcaaagtccgagatacagccgatccccagattaccttccatctcttccacatcccgctcaaactttgtacggaacggcgaattctcaatattatgtatcgcgcggttaaatccattctcaccgtaagtcgccatcccgcctctgcgcgtgccgagatgggaatgataatccacgccgtaaaaaagctccagtgtacaatctgtcctggatgccacgccaaaaaaaccacccatatataattctccttttctctcacgaaatttatgatccagttcaaccctttatagtgtagcatgaacagcgaaaaaatagcaaccgccttccatacgctatttattattatcatttataactgtttataagcaggatatatgtctggcacattttttttgatatttaattatcaatatctccattgacatcccgatcaccgaatgataacgtaacactataagttagttatagctaacttttttcggaacaggcagctataattatacaaatcaaaaggaggcattcaattgaaaaaacagtcaaatctgtcacggcttttaagctatgcaggacactacaaatatcttacatatgcatcatggatattatccgctctgagcgcgctgacagccctcatccccttctggtacatctttaagatcatacaggaagtattggaaaccgctccggatttcggcagtgcaaaacatatgatccacaacggatggatggccgtactttccgcagtcctcgctctgttgatctacatcggagcgcttatgtgctctcacatcgccgcgtttcgcatcgcggccaacatacggattgaggtgatgcaccacatcgccgcactgccgcttggattcaccgaaagctttgggagcggcagactgcgcaggacggtcaatgaatcaagcgccgctaccgagacatacctggcccaccagctccccgacaaagccggggccatcgccacgccgctcggcctgctggccctgctcttcctgttcgactggaggcttggcctgatgagcattattcctgttctgctcggtttcctcatcatgatgagcatgacaggaagcaagatgcagcacaaaatggaagaatatcagaacgcacttgaagacatgtccaacgaagccgttgagtatgtccgcggcattccggttgtcaagaccttcggtcagaccgtattctcatttaagaaatttaaagattccatcggaagatatgagaagtgggtcgtctcgtatacgaaacagctgcgcctcccgatgttgttctatactgctgcgatcaacagcgtattcgcatttctcacagccgccggcctgctctttacacgggacggcgttacgaatgactttcttctgaacctccttttctatattatcatcactcctgtcatctccgtcactctgactaagatcatgttccagagtgaaaatgccatgatcgtcgatgacgccctgaggagaatcgacaatgttttagatgcagaaccgcttcaggagactgcagctccaaagcacccccgggacaattccgtagacatacagaatgtaagttacagctatgacggcgtaaaaaacgcgttggaacatgccaccctgcatatcggggccggagagactgccgcgttcgtcggcccgtccggcggcgggaaaacaacactggccaatattcttacccgcttttttgacccgcagtccgggaaggttcttatcggcggtacagatgtaagagatatgacaaaggaagacttgatgaataccgtatcctttgtcttccagaacagccgtctcatcaaagcatctatactggaaaatgtcaggatgggccggccggatgcctcacgtgcagaagtaatggaagcgctgagagccgcccaatgtactgatatcattgaaaagcttcccaatggagcagatacggtcatcggcaccaacgggatctacctctccgggggcgagcagcaacggatcgccattgcaagggtaatgctcaaaaatacgcccgtcattatactggatgaagcgacggcttttgcggatccggataatgaggctcgtgtacaggctgctttcgcagagcttgccaaaggtaagaccgtcgtaatgatagcgcaccgcctttctaccgttgtcaatgcagataagatttatgtgctgaaagacggcaggatatgtgaacagggaacgtgccgcgaacttcaggaagagaacggtctgttccacagaatgtggaaggattaccagacatctgtacaatggaaagttgcaaaggaggcgtaactgaaatgatcaagaaacttcaaaaaaaactggctctgtccaggcagggcgccatagacctgataaaaggctgtgccgcatgcatgcttcagaacataagcttcatgtttcctgtcggactgctgtatatgctcgtagacgatctgctgaacggcaggacagtgaccgaccgcgcaggactgtatgctgccggctgcgtcctctgtatactcctcatattttttacaacgtggctgcagtacaacgccacttactttgccacatataaggagagcggggtgcgccgcatctcactggctgaaaagctgcgcaagattcctctggcctttttcgggaagaaagatctggcagacctgacaagcacgatcatggcagactgcacctttttagagcagagtttctcccactttataccagaattattcggctccatcggttccacgctcctcatatcaatcagcctgtttgtatacgactggcgcatggcgctggccgctctctgggtcgcgcctgtctcctttgccatcgttgcactgtcatccagagtacaggaacagctaagcagacggcagatgaacgccaagatggactgcgcagacggtatacaggaatgcatcgaaaccctgcgtgacctgagagcatgcaacgcagagaaaaattatctaagaggactcgacaaaaagatcaaagcggtggagcgccgggcgatcatctctgaattgggaacagctgtatttgtcgtatcggcaaccctcgttttaaagctgggcatcgccactacggcactgacaggctccgctctgctgatagggggaaacctggacgtgccgaccttctttatgttcctgcttgtagtctcccgcctttacgaccctctccagggcgctctgcagaatctggcagctgtgatcgctacgcggacgaacatcagacgcatgaatgaaatcctggatcaccatgtgcaaagcggcagcgaaatgctttcaaatcatggctgcgacatagaattttctcatgtcggcttcgcctacaacagcggggaaactgtactgaaggatgtatcctttaccgcaaaacagggagaaataacagcacttgtagggccgtccgggggcggcaagacaaccgtctcccgccttgcggcgcgcttctgggatatcgatcgcgggaccatcaccgtaggcggtatggacatctccaggatagatccggagaagctgctgtcactgtacgccatcgtatttcaggacgtcactctgtttgacaatacgatcatggaaaatatccgcatcggaagaaaagatgccacggacgaagaagtgatggcggcagccagactggccaactgtgatgagtttgcgcacaaactgccggacggttaccaaagcaggatcggagaaaacggctgtgcgctctcgggcggtgaacggcagagaatctctatcgcaagggcattccttaaaaatgcacccattattctgcttgatgaggccaccgcctcacttgatgtcgagaatgaaacgctcatccaatctgcactgtcacgccttatccgtaacaagacggtgctcgtgatcgcacatcgtatgcggaccgtcgccggtgcagacaagatcgttgtactggataacggaaaagttgccgaggaaggcgcaccggagaaactgatgaagaaaaacggagtttactcccatatggcgaagctccagacatacagccaaagctgggcgctcgaataacacgttcttatatctcaacaagttcatactcttcctgtccgagtccgattttgaccgcatgtgcaataccggtcttccagttcgtgtccggatgggtcatatggaaatggtcatggcattttgcttcttcatgatgctctttacagttttcgtggagcacgcttccattttgaagcaccggctggctgttgcacagatccgcgcacgctacatcgagcgccaccggatcatacgatgccagcattccgacgtttggaatgatcggcacatcattttcagaatggcagtcacagttcggcgatacatcgcagataagagaaatgtggaaacacggccttccctgacagaccgccttgctgtactctgcgatcttgcagttgagcacatcgtttgagttactttccgtagggtggaccgcatccttcggacaggcgccgatacagcggccgcagccaacgcatttgtgaaggtctatgtatgcttttccgtccgtgatgaccggtgcatcgtgggcgcatattctctgacatgccccgcagccgacgcagtattcctgttcaacggccggcttgccctgattatgcatctccatcttgcccgcgcgtgagccgcagcccatacctatatttttcagcgccccgccaaatccggtgctctcatgccccttgaaatgtgtcagtgtgataaatatatccgcatccatgaccgcctggccgatcttcgcctctttgacatactcaccgtccaccggcacaagcgcctcatccgtccccttaagtccgtctgcgatcatcacgtgacagccggtagaaaacggtgagaaaccgttggcgtacgctgtgtcgatatgatcgagcgcatttttcctgctgcctacatagagcgtattgcagtctgtaagaaacggcttgccgccctgctcctttacaatgtccgccactactttcgcgtagttcggacgcagaaacgccagattcccgtactccccgaagtgtattttgatcgccgcgtatttatcctcaaaatcaatctctttcatgcctgcggtaatgcagagacgtctgagtttctggagaagattctcattggccgtcgccttgaagttcgtataatatacttttgatttatccatgctttcctccttctacatcccatatggtctgtcgtgcgctatgtgatagttccattttacatgaatccgtaaaatatgtaaagaagcgcacgtgtggccagacgcaaagaacgggtaaggactcctgcagacaggaagccttccccgttttatatacaaaataatattatttttaccgattttattaggcgaagtccgacgatcatactacttcataagcacgaccgccgtcttctttaattgatatatttattatacaaaatgattatgacccgaatgtgtcgaaaggtgaaaatgtttataaattttcttaagaaaaaaggaaggctttgccgcatgaagcttatcccctgcttctcttcatctttttccctgtataaatgagcagcagcatcagcccgctgaaagcaaggagaaagtaaaaactgatgccgcggctgaggagaactgcagccgtcatggaatttccgctgtatatgcttccaaagagctgtataaatacaaactcacttatccccatcgcccccggcagcggcagcagcgctcccgccatatagacgagcacctgcagcagaaaaagatgtataaacgggacgccgtgatacccaagcgccagatataccatatacggtacaccgaaccagcatacgatctggactgtgctgatgaaaagcatctttacgatctctctcttatgctgcttcatcgtgagcgcgcatgtgtgaaactcttcaagtcctgcctctgtcttcccgatccactcctgttttttttcttccttcacaaacggaagcttcgggatgagccgctcgatcaaacgggaaagcttctttcccattttctcggaaaatataaccgttacaagaaacagtacaaagactgcgttcataacaaatccggcagcggccagaatctttacagttacaggcacctcaattcccatgaccggcacgagtattaccgccagtatctcaaagagaaagacaaccgtctgaaatcctgccagttccatcagcagtgcaagagaaccatgagacagttcgatcccgtctcttttcatcatgtacagctgcatcggctggccgcctgtggaggacggtgtgatggagctgaagaaaaacccggtgtaggcatacttcatcccctgtacaaacgataccggatgtcccatcacccgcagcaatatcctcagattcagtccctcggacacatggaagttccccgccatcaaaagaccgagcgcgatggatggaaaggaggccgaaacggcgatatccattatctgccctacatcttttcctttcataagacagaaaaacagcagaaataaaatcagcagaaaaatcaatatttgttttccggtcttctgtatagtcattgtattattcattgtcgtccaccctcttaaacgtgtacccttcctgcagcagcatcggaagcgcctgcctcagcgcgtcaacagttcttgccggagctcccgcagcgcctcttccgtcatgcagacagatgaccgctcccggaaatactctgcgcatgatctttaaacaaatcgtgtctgccgtctccttctccgaccagtcctgcgccatgacatcccagaatatgagacgaagattcagccttttaagccaccccagcgtgaacagattgagatgtccccacggcgggcggtaatagacggcgtcacatccaagcttttgcagcgcaaacatggactgcgccagatccgtatacgtaaatctgtttccccggaacaaagcattgttatgatgtaccgagtggagcccgatgagatgtccttcctccttcatccgcgcaatgagtgaaggatacttcccggcggactcagccactgtaaaaaatgatgccttgatatcatactttttcagcaggtcgagaagcgcttccgtgtcgcttccgcccggcccgtcgtcaaaggtcagatagaggaccctgccgctgccggcgtgtttccgcttccacgtctgtacatacctgagtacaaaggacggaaacacactgtagcttaaaactattatggccagaacggccgtcgctgctatcatccacatcatgccgccatcctttccgctacggtacgcattgcatcttcgacactgcattccatgatctcacgtttcactctgcgcatattttttttcatctcctgccactgtctgtcatcggagaggaattctttcagaataccggtaaaatcggttgttttatcccagatcaccctggcgattccgtgttcctgcgcataccgcgcgttgttaacttcctgctccaggaacgggtgaattacgaaaagcggcacttcacagtgaataagttcaaataaggtgatccctcctgcttttgtgatgacaagatccgcctccttcacatgatcactcatattttccgtataaccaagcacttctatgtcatcgtatttcccatgccatgtctcgtacgctttctgattcttccccgttatgatcgtcgcggatacgccgggtgtgtggtggagcatatctataagctcatccagatttggtatgatgccgagccctcctcccatgatcagcaccttcgttactttatcccgctgctttccggtgttttcaagaaactgctgtctgaccgggattcctgtcacgaacacattctccggcgccgttcccctctccacgaggctttccttcacctcatttgtcggagccagataggcgtctgtctgcggggttatccactccggatgtatactgatatccgtgatacaggtaacaagcgggatccggcaccctgtcttctcaatataagaggcaattgactttgcacagagcggcagcgtacatacgatcatatccggctcatactcgtccataagcttctgcagctttttatacaccgtaattcccgacggttttatatccaccttcattttgcctgataatttatataccatgttatatattccgtaacagtgctccacaagcatatggaacaacttaaatatatagcggcttacgcgcggataacagtaagtgagcagatccagctccgttaccctggcgtcttcattctgtttctttatctcttcaccgatggctttcgccgccatctgatgacccattccaaactgactacttaaaattaatacgttcattttcccatctcctttcagattacttatatcttagcccgcaaatctaaagatttcctaaatacaattctaaatatccgtctaagaatggatgtagtttctcttaaggagaacggccttttttcaatgatccacagaatatcaacaaagccgccgcggtttatcaccgcagcggcttttctaaaacgtatccggttatggcaggaacctgtccccccgccttatacacacctttgataaagccaggtacatccggggcagttttccccgctcatttccgacgctttgtgccgcggcatttccgataggccgccagggaggcgcagcccaggaggaccgccaatattatcaccagccagggcagtatgtctgccggatcgcccgtctgcgggacagtgtccgatttgatggtgatattcctggtatgaggcgcgccgtccgcggtgcgggtctccgccgtgcccttgcctggcatggtaaacgccggtatcgggatcttgaaaacgcggtcgctcacattgccgtccgcgtccttcaccacgatgtaaatgtccttggctccggcagagagggtggtgagacggatcgtctgaaggccggccccacaggccctgcccctgccggtggtgtcgatggcgggccgggccgcgccgctgtccaccacggcgtagtaataccaaccggccctgctgctggtgaaggtaacgttggccgccgtatcgctcgtacggacagccgtgccggctttaaggacgggggccgtggcgttaaaggcggtaaacgtccatctgccgaattgggccatagctttgccgctgtcaaaagcatccgcactgtagcccgcgccgccgaaggggtagtacaccgtgccggtggtagcgtttgccgccattgcggataatatatagctgcctatggcgggggcgtctgcgccgtaaaagcgcaggctggtgagactggagcattcttgaaacgccctatcgccaagacttgtaaggccggcggggagacgcacttcggtgagggcggcattctcaaaaaacgcaccgccgctgatggtagtgagccgggcgtaaccagacaggtccaacgtgccggtgaagccgcagctttggaaggcgttatcgccaattttggtgagaccggacggcagttccgccgcggccagatttccgcagcctgaaaacaagctcgtgggtatgactgtcatttgggccggcagccgcacactggaaaaaccgcagccagagaacacatactcaccgatggtggtaaggtttgtcaagccgatcaggtccagccctcccgtgaacccacagccagagaacgcaaactctccaatagtggtaaggtttgtcaggtcggacacgtccagccctcccgtgaacccacagccagagaacgcatactctccaatagtggtaaggtttgtcaggccggacaaatccagtccccccgtgaacccacagccagagaacgcagactctccaatagtggtaaggtttgtcaggctggtcaggtccagccctcccgtgaacctacagtttacgaacgctctacggccgatggtggtaaggtttttcaagccggacacatccagctctcccgtgaacccacagccagagaacgcatactctccaatagtgataaggtttgtcaagccggtcaggtccagccctcccgtgaacccacagttagagaacgcatccccatcgatagtggtaaggcttgtcaggccggacaaatccagtcctcccgtgaacccacagtcagagaacgcatacccaccgatggtggtaaggcttgtcaggccggacaagtccagccctcccgtgaacccacatttatagaacgccgtactgccgatggtggtaaggcttgtcaggccggtcaggttcagccctcccgtgaacccacattcatagaaagcactgctgccgatggtggtaaggcttgtcaggccggacaagtccagcccgttcgcggtgaggtttttccaactattgaacgcattgtcatggatctgcacaagattcaccgccccggtgatgtccagagtggtggccgctgttccttcggcaaaggctctttccgcaatctccgtcaccttataggtgttcccgccgccatcctggaccgtggcagggatagcgagggtggcctgcgcgccgcccgctccccagccggtcagagatacggtgcgaagatccgcgccacttgtcagcaccttgtactcaaggccgccggcctcaaaggtatcggctggcgcatccctatcggtggcggcaggaagtgtcacgccggcggctgtttccgcctgtacggccggcgtgccggtgtccgagttggatgccgcgcctccgccgtcctcataatctgtcgggacgtttattcttaccggcagcccgccgcagctttcatcatgcacatggccgcagggcgccccctccacagcggaaacatagccgcagctcccgtcgtgaacatgggtacagccgtcgtttgcggcaacggccacagcgggcacattcccgcagaaaagaagcgccgcgcacaacacaaagcccaaccgctttttcattctcatctcaactttcatcatttatcctccttcaggtcaccttttttagttgccgcgtaactgcgcgctgccgttgcgcgtatacagacggtccgggcgccggccgcttcgcagggaatcgaaagactgccggggctattgtcccgctcttttttgcggcttctccggaggctttgtacaagagggcggacagagggacttgttgtgcctgtgtaacaggcacaacaagggggtacccccttgtgatcagatattcgccgcccggctcgttgccctcacgaagaaagcaaaacagaaagcctgtaaagactttctgcgtgtatggtttattccgctttcattttaccataagaggtgcaaaaaagggcgaaggttgaaaaatttataccttcgcccctgcatgattccgtttttgcttcaaacagactggatatacaccgtgagacaggcggcggcttttatcgcagaagcacatgttctgtccacagagacagagtcagggcctgctgatatatgaaaccgacatttccctcttctatatttctctctcattatccgggcattataaggtatggatgaatctgagaaaggcttttttcccttcttcagtgcacttatatacgccggcattttcaagtacccgtgtgaatgtaataccgatctcttttttcagaatatccatcacattctctcttgtgatctcgtatttatctttgaaggctgccgcccacgcagcgtgtttggccgtcttctcatcttgttcgatatcactgccctccaccaggtgttccgcgagagcttccatctcgtctttgagcctggacggcaggacggcaagtcccatcacttcaataaggccgatgttttctttctttatattgtgatactgcgcgtggggatgatatacgccaagcggatgctcctcagacgtaatgttattgcggagcgccagatcaagttcaaatgtatctcctaccttacgcgcgatgggtgtgatcgtgttgtggggctctccgtccgtctctgcaaagataaaggcatcctcgtccgtgtagcctctccatgccgtcagcacatggtccgccagcgcgataagccgcttctcgtctctgcttcttatgcgcagcacagacagcggccacttgacgatccccgcttctacatcttcatagcccgggatcgtaaccgcggtctccaccggcgcctttgccattgcaaatgtataatttcctccctgaaagtggtcatgacttaagatagatccgccgacgatcggaagatccgcattggagccaagaaaatagtgcggaaacagctttacaaaatcaaacagctttacaaatgtattcttctctatcttcatcggcgtgtgctgtccgttcagcacaatgcagtgctcattgtaatagacatacggtgaatactggaatccccacctgctgtcattgatcgtgaccgggatgatccggtggttctctctggccgggtggttcagatgtcccgcatatccttcgttctccatacagagcagacacttcggataacccgacgctttggcgcttcccgccgcggcgatggcctttgggtctttctccggtttggacagattgatcgtaatgtcgatctcaccatagggggagtctgccttccacttcatatctttttttacccggtatctgcggatgtagtcactgtcctggctgaacttgtagaaatagtccgcagcctccttcgcagatatgtcatattttttccagaaggtctcctgcacctgcgccgggcgcgggagcaggcagttcatgatccttgtgtcaaacagatcccggcatgtgatgctgtcttctatgagtccccgggaacatgcctcgtcgagaagccctttcagcacatcctcaaggactatatccgacaggtcgcattctgtatcctcataattgttttcgcaaaacagatcaagcagcagattcgttgtataactgcgctcacattcaggtgtcagtcctgtttccactccgtattcaaccagcttttttatattttcaaataacatctcagcgtctccttttcccctgtccttctttattcctctgtgacggtttcccggaatctgtgggctccatcgccgatatcgaccacatagaattccgcctcgcatcctgtctgtttccggtatccgcttccgagcgtttcgataaaggtatcaacggcatctctcttaacgatgctgaccgtgcagcctccgaatccgcctcccgtgatgcgtgatcctatgacgccgggcacttcccatgccagctcaacaagaagatctatctccttgcaggacacctcataatcatctctctgtgatatgtgggattcattcatgagacggccaaacagttctatgtcaccgcttctaagcgcctccactgcccggatcgtcctccggttttcgtatacggcgtgttttgcccgcctcctcctcgtttcatctcctatggcagactgatacttttcaaagtcctgctccgtcaagtcgcccagcgtctcgatatccgtaaccttcttcagttccatgagcgcctcttcgctctctcttcttctgtcgttataggcggaatccacaaggctgtgctttaccttgctgtttgtgatgacaatgcgcgcatctgtaagtacgacaggcgcatattcatacacgagcgtattcgtatcaaggaagatggcattgtcctttttccccatggcgctggcaaactggtccatgattccacagttgcagccgttaaagttgttctccgaatactggccgatgagcgcgatctctgtcatggagacatcaaagccatacatatccttaaggatcagaccggtaagcacttccagcgaagcggacgacgaaagtcccgagccgtttgggatatccccccagataagcagatccagtccatatgaaagcttgtatccgcgctcctcaaaggcccacatgacccctttcggatagttcgtccatcccgccgcctcactcggaaggagttcatcaagtcctgtttctattactcccattgtgtcaaaattcacagagtagaaccggagtttcctgtcctccctcattcttgcgatcccgtaggtgccgatcgtgagcgcgcacggaaacacatgaccaccgttataatccgtgtgctctccgatgagatttacgcgtcccggcgcaaaataagcgcggatatctccgccctccccgtacagttctctgaacttttctgttaatttctccttcatatacctttcctttccccgctcacggacagactcctgcctgccggtcaaaattaccgttgccttatttttatctttattctataattttaatgagtaatgatacagaaaacaacaactataattgaaaaaactataaggatattgagatatgcagctgaagatcagaccagatcagatggaaataaaagaacatggaaattacagcttcccggtatatgtaagcgaagaatccatcaaccgctttgactcaaactcttttctctggcactggcaccctgagatagagattacatgggtcatgaaggggcggatcgaatatcatgtgaacgacacaggttacattctgacagaagggaacggactctttgcaaacagcaatgcccttcattccggatatatgacagaaaagcaggactgtgactatctatccgtaacgttcagcccaagattcatctatgggtatgaaaacagcgccctgcatacaaaatatgtagactttatcacttccaatccggactggtcctccctcttactcagcagagagacggactggcagcgcgatatactggacgagatccggcatatatatgccttgtcgaaagctcctcctgcggattatgagcttaaggtccatattgcgctgtgcactgtctggcagaagctctaccgctattacagcacagtgcccgcagatgagcggcagacatcggaagccctgagacggctgagagatattctgtcttacatacagctccactataatgaaaatattgcattagaagatattgcccgcagcatcggcatatgtaaaagtgaatgctgccgctttttcaaaaagcatatgcatatgacgctgtttgaatacgtaatgtactaccgtatacagcagagtcttcccctgctgaaagcgggggagagcatcacaaaggccgccggtgtctccggcttttccaacccgtgttattacggaaaaatattccgccggtatatggaatgttcccctagccagtaccgaaaactctggcgtgactcagctatttaggcagtgcttcctgtaaatgcccactccaagcccgcccggcccgatatgacagccaatgctcagcgtaagcggcatatacattacatccagaccagggaattccctttcaaattccgctttccagccttccagaagcgccggctccatataggtgccggcaatgcccgcgcagagacagccggcttcctgcaggccgcggaatcttcccgccagttcccctttcagcgcccggcacatcgtcttaaaagcggatttcatcccgcgggctttcgcataggcatccagcttatctccttgtatcgtgagtacgggctttatattcagcactgtgccgaccgcagctcccgccggggtcactctgccgcccttctgtaaatactccagcgtatcgaccgctatatatatgctggcatccagagcctcccgctcgaggatgcttttgatctccgtcccgtttctcccctgctgaacgagaatccgggcatccagaaccgactgcgcctgggtgatcgatattctgtgattatccacaacatgcacccggccgccatactcctgcgagaacgcggccgcacattcataggaatggctgagcccgctggacatcggaatataaacgatctcatcatatttctcaagcagtctgtcccacctgtccatgacatctcccggcgaaggctgggaagatgtgacggacgctccgccggacagcttttcataaaactgctcctgcgaaatatccagcccttcataataagtagttccatctatgacaatcggcatcggtatgatcgatataccatacttttctccgtcctcctgcataaatccacaattactgtctgtcatcactgcaacgcctggcataaacgctcctttccgttagctaacacattgaccgttattattacacgtgttaagattatagcaaactgaaggaagaagaacaatttacagatattcacttctgtcagttatttatacagattggagaaattgtaaaaaagatcatggaagacagacgcgtccggaagacaaagaaaaacttaaaaggtactctgatagaaatgctggcggatatgccgtttgaacagatatccatcaccgaactctgccgcagagccgacacgagccgcatcaccttctactctcactacagcgacaagtatgccctcgcggatgatatctttcaggatatgatccgcatcgggacaggtaattatatacgcagacaggcggagaataatcccggcagagaccttgtgctcgggtactgcaatgtgctggacgtcatactggaattatactatgccaattacgactttttccggcacacactgcccgaggagaatccgtaccttgcattctctttctataactatgttctggaaacggtagagatgcacacagacaaagaggcacgcatattaaactttcaccttagatacaccgcaaaaaaaatcgcaggattcctctgctacggaatcctgggatttatcaacgaatgtcattcagaaaaggaaacactggaagaaatacgcggggaagccaaggaaatattgaaagggctcctgcggtccgacgtacttgtcagccgcgaaacttcaccagctccgcccccggcataggccgtgcataataaaagccctggatcttatccgcccccatactggtgagcgtctccgactggccggccgtctcgaccccttctgcgataacttccatccccatctcatgaaacaggcggataaggccgcacactatattgtatcccttctccgccttctcggtgatacccacaaggctcttatccagcttgatcgattcaaaatgatactctgccacggaagcaaaattagaataaccgatgccaaagtcatccagataaaaacgaaatccgaattcttccatctcatgtatcactttctgcacctgcaccgcatcttctgatatgacacgctcggtgatctcaaactttatcttttggggcgcaatgtcccatgcccccagaagtctctggatcctccgcggaagatcaggctcctcaaattgttccatagacatattcacagatatcgtaccgaccggcagatccggatttctcttaataaaccggcacacttccccgagcacctgccagaagatattgctcacgactccgatcccttccgctacagggataaattcatccggagagagaaaccctccttctccgtcccggagccttacgagcgcctctgcagaataataacatcccttttccggggaatataccggctggtaccatacttcaaaaagctgttctttcaccgctctgcgcacggtatccgccaccatcctggcgcgcaggaaacgttcttttacttccctgccgaaatgtatatgcttctggccggaatgcttggcaagcgaaagcaggtagtccagaagctccatcatctggtcttcttcctggtctccccccgtatggaccatactgccgaaagctgccgttatggtctcctcgtactgtccgatcacccatggctgctcaaacctctcttccagctctcttgcatatctgtccgccaaagcagagtctgaataaggaaatataacggcaaatgtcacccctatatatctgtaaacggcagcttccctgtatgtctcttccagccacaaaacaatggcgtagagaaattcattgccggtctgatggccgtaacgctgattgatagctccgaaatctcgcggaactacaagcagtacctgaaacttctgctttcccgccacccggtaagcaagctcggaataaaatgcatttctgtttcccgccccggtcacgctgtcattctctctccgctggctgaagaagcttataaaaagaatcgtatcgacaaacgccacgatgatcccattgagcagcagaccctgatttatgagctgcattgcaacaagcgtaatgacaaccggtggaaacagtttcagcgcatgtttcatctccctgctcacactggaacggtgtctgaaaaaacagatatacagaaatatcatctccaacagcatgacgccgtaacctgcgccattcaatatacctctgtgataattgcccccgctgtcaaaccagaacaatacccccgccttcagattcacgaaaataaggacggtatagagactgacaaaagagacgagcattcttctggcacgcacgatgcagtattggtcatacacgtgttccagcattttctcaaatatatacatggccgtcactgaggtgagcagtacgacgagccagaaatacaacgaattggccagtacatttattcccccaggtataagccttctgtgcttcagcaaaatgacacagatcatatttaacacaatggaacatcccgaaagtacaaggcatgttccaaacagcttcagcgaatgtgtgattctcttcttatatatcgcaaggctcgacaacagaattatgacaagcagcagcgcggcaaactctgtgagcagtgaccagtttgacatatattgcggacctcccccatctatacagtaccctcatttcatatggttctaattataactgtaaatgaatggcagttcaacaaatatatgtcataaattgacgttactgcccggatgaactccccatcagtccctggtcgtaacgctctatcttcccgttcagacgctccagcgccgcctgcatatcctccatcctttcgatcagacggtttctctgctcggcaagaatatccctgcgggcatcgaccgtatcgtccccctgccggtacagcgccacatattctataagcgcttctatctgtacaccggccttgcgcatacactttataagctggacccactgacaggactcttcatcgtagtctctcacgccgcttttattgcgcggaactcttggtataagtccgattctctcataatagcgcaatgtgtcggcagacagatcaaaacgttcactcacttctttgatcgtcatactatgtccctcctgattttatatgatctggttgtttaaacattgcggccggcatcatatgcttcctgcattgccggtttatctttgatctctcccgcctgccatactccggcgccatagatgacgcctctctcccggggaccgtcaagacagaccgtaaatccgcggagtccttcgaccgtacgctccatctgcgcgatgctgtccaccgccgcagtgacgataaaataaaattctttctctttcatctccgtgtatctggaacagcaccggtcgatgagcgttttcatctgggcatccatcgtgtagaaataaacaggcgtagccatgacgatcacatccgcctcgatgagcttatccaggatcttagccatatcatccttctgcggacacggctttccgagaaaagaacaagtaccgcagccggtacagtaattgatattcttttctctcagaaatattttctccgctttatttcccgcctcaacggctcctctcataaactcatcacacaaaatatccgaattcccgccctttctgggactcgccgacagtaacaatactttcttcatattttcaggctccttccttagcttttatatgagcgtatcacctggagtgtactcaaagtcaatacttttttggaagatcatggaatttttatatccatgctgcctgaacggaagccctccagatctatcgtgatatatgtaaatccgagttctttcagctgttctgtcagttcctctctgcgcctgaaaagcccgtccagagcttctgcatccacttctattctggcgatatcgccgtgcagacgcagacgtacattataaaagcccatttcccggatgtacgcctcgcccctttctatcatctgaagcttatcacaggtgatatgtgtgccatagggaagccttgtcgccaggcaggggctcgccggacgttctgccaccgagacgccgcgccttcgcgccagttccctgacttcctgcttcgttatgtggcattgtgccagcggacttaaaatacgaagctccttgagcgccttaagaccggggcggtattcatgcaggtcatcttcattcgttccttccagcacacagcgcacattgagtgtttccgcaagcgctcttatcttgcggaaaatactcttcttgcagcggtagcatctgtccaccggattctctttaattccagcctcgtcaagctcatcgatctccagcacacgatgcagcgcccccatctcccgggccactctcctggccgtatccaggtcgcttcccggatgcagctttgtcatcaccgttacagcgtacacgtctgtgccattctctaaagccgcatcacacgccgctcgcagaagaagggcagagtcggctccgcctgagaatgccacgacaacatcttctttcgtccactccttcagtatatgcgaaagccgggcatatttttcattgttttcttccatcacattccctcacgatcagtgcgtatacctcctgatacggtcgtttacatgccctgccaagagccgcggtgctttcatattccggatacgccctgacattggaaccgacccggcacatcttcaccttcgcgtccccgatgcttgtatgcactgtctttaccgtacgctccagcacggtgcgctccattctctgtctccgtattccgatggtcgtcgtctcctcgaatacgatctgttccagccgtgggatatcttcctcagagcatatgatattaagctgataggcaggacggtttttcttcatgtagacaggcatataatttacatctctggcgccttcttccatgaggcgctccatcacgtatccgagcgcttcgccggtacagtcgtcgatgtttgtctccagcttccatatacagtcgctttcaaaagacagactcgtatcttcaattaacatggcccttaagatacccgggcggtcatactcccgttttcctgcccccattcccgtcttcctcactgcaaatgacgccggcagtttctctgacgtacgcactgcggccgctatcgccgcgcctgtaggtgtgacaaattctccccggctttctgtcaggctgagattcaaatgatatgtctccacgatattggcgaccgccggcaccggtaccgggagaatgccgtgctgacagcgtactgttccgcagccttcatagagcaccggcacgatgcactccttcacgcgcaggttgtcaaggcagacggccacagataggatatctacgatcgaatcgaccgcccccacctcatgaaaatgcacttcctccacaggcacgccgtgggctttcgcctccgcgtctgccagaatccggaatatcttttccgctgtttctttcgcgccgtctgtcatccgggcatggctgattatgtgaagaatctcatgaagtccccggtggacatgcgcgtgcgcgtgtgaatgtccgccttccccgccgtggctgtgtccgtgtacgtgtccgtgatgaccgtgcaggtattccatgtcatgatcatgattttgatgcgcttcatcgagaacaacgtcaaaatcacatacgtcaagccccgccttttttaccctgcttatttttatccggaagccctctaccggaagactctcaagcgcctgctccagtaccttccggtccgctcccaggtcaagcagcgcggcggccgtcatatcgccgctgatgcctgagcagcattccagatatagtatgttccctgtctgtttctccatattaccgtacccccagtctgttgatctgcgccgccatatatcccgcgccgtagccattgtctatgttcactgtcgcgatcccgtttgcacaggaattgatcatcgtaagcagcgccgacagtcctttaaagttcgcgccgtagccgaccgatgtgggcactgcgatgaccggtttatccaccagcccgcctatgacactggccagcgccccttccatgccggccactgccacgacacagtttgcgctctgaagtgtctcaagtcttgcgagcagacggtgaagcccgctcactcccacgtcgtagatacgctccacactgcatccgaaaaattcagctgcctgggcggcttcctccgccaccgctatgtccgctgtaccggccgtgcagaccgcgatctttcctttccgctcttttccttccttctcggccttcaaaatgcgggagaccgggtcataagtgatctccggtatccgctcccgcaccagttcatactgtgcctcggacgcccttgtgccgaacacctctttgttttcttcaaaaagaacttcaaagatatgcagcagatgttcgtctgccttaccgctgcagaacactacttccggaaatccggaccggatctccctgtgagtatccagcttggcataccccatatctacaaacggcttccggcggaaatacctttccgcttcctcaaccgttatctctcctcttttcacctgttccaatatctcatgcgtctccatcgctcagactcctttcataaagcggaaggaaagaggcagttccagcccgtgagaggcgagcagctcttcatcctttaatatctcttccgtctttcctgcccgcacgatctctccttctgacaggagcaccgtcctcccgcacgtgtcgtagataaaatccagatcgtgggaggcgatcagcctgaccgcgggcagctcatttaatatatgtatcagcttcctcctgttcccagggtccagtgcggcggacggctcatccataagcagtatctccgcccccatggaaagcacggaggcaatggcggccagtttcttctgtcctccggacaggcggtaaatatgccggtctttcagctcctcgatgccggtctgccaaagcgcctccagcgtccgctccctcaccttctcttcactcataccgtagtttcgcggggcaaaagccacatcctcatataccgtgttcataaaaagctgactgtccgaatcctggaatacataaccggccttccggcggatggcggacagattctccttcaccacatccataccgcacacctgcacgctcccttcataaccgggcagcagaccgaccagtatcttaagcagtgttgacttccctgccccgttggcgccgataatgccgacagactctccgtcttccgcaaaaaacgcggcttctttaagtacaggggctgtctgccctttatctctgcttttgtaccggaacgtaaggttttctatctctatttttttcaaacgtgatccctcttttctgtcacatcccaatcatcctgcctgccgtctcaaacaatggaaatacgcgaagcactgacagtacaacacaccagaacagtgcgtatcgtatgctcccgcggtgcttcccttccatgccgcttaaccggtactcacctgtaaatcctctcagcgtcatgctctcatacacgagttccgcacggtccatgctccgcagaagcatctgccccgcaagtgtcccccagactttgaaacggatacctttttcccccggcgctctcagagaatatgcctgggtgacccgctctgcctctttcagcatgagcatgacgtaacggtagatgagcatgataagcgtgacgagtatcttcggcacatgcagcatacgcagggcgcagcagatcttttctattgacgtggccgcggccagaaggtaggacgcagacacacagaacattgctttcagcacaagcgtcagcatggagaccactccgcccgtcaccggtatccttcctatatagaacagcacggctcggtcgaaaaacggatttgcgataccgaccatacacacgacaagcagtatgtacttcagctgtccggcagcccgcttaaaagacagatcaccgagaatgataagaatgaccgggtagaggcacatgccggccagaccggacaggttgtatttgccaaaggacacgaccagaaccatataccataccgtcactatgacctttgcaagggggtgaatgcggcaaagccatgtatcacgctccgccgactcgtccagataatgtatcccgcgaattgcctcatcgatcctgctcatgcttctctttctttctgaaaaaccggaatgcatagcaggaaagcacgcagacgagtatgacggcggccccgcccgcaatgcctgccaccgatgtcccggccgccgactcactgtggcggaacatatagtccggaagcagggccgttgcactctgtatcctttccgccagaacgtgcgcctgcccggaagccgcgatctccgcagatcctgtgattctctcaatcgaccattccagcccgtccggatatgcggacgcaagcagcgagatgccgcctgcggtcacagccgcagccgcagcgagtacgagcatcgtctttttatagctgagctttccttcccgaatcggacccggacccgcctcaccggtccagatgagctctggtctcgcctcatatacaaagataagcaccgccgccgtgatggcgccctccacaagcccgatggcgaggtgtatcggctgcatagccgcggcaaacacaccgaatggcagttccgtcactccggaagccaatgtctcaagcgtcactgagaatgcgccgagctgcaatgtcagaacacaggccgcaatagaagcgaacatgatctttccccggctcactcctctcttcatcatctgcttccatatgaggaagcctcctatgaaacagccgtagaacgccatgttccatatgttgcatccaagcgccagaagcccgccgtccgcgaacataagacactggatgagtagaactcctatcatcgtcagaaatcccgcataaggcccaagtatggcggtcaaaagcacccctccgcacagatgtccggaggaacccgtccccggaatagtaaagttgatcatctgggcggcaaatacaaaagcccccatcacccccatcgccggtatctttcccggttcatcttccatccttacctttttgagcgaaccgcctgccgcggccgccgaacaggcgtacatcgtccccgccaccgccggtgttataagcgcgtctgccatatgcataatacaaatcctccttgtgaacagagattccttttaaatctcctttatcataaaaatgccatgaaaacataagcctccttgggaagcctcacaccttcatggcatttcatttcttattatttttcctcatcttcactgaaccggccttcgctgagcgtgccggcatatgcgtccggaacggatacgcggcgtccggcctggccggacacggaggacacttggcgccctctttttatgccgttttacccgatcatcccgaccgcatcgtccacgagctcactgagcgtgtggtccccgacgcctgccacataaaatccgcacgaatttaccgggatcagcagcttcctggcgctgcttcccgccactgcccgggccatcactgccgtgacttctccaagaagcgcatccgccgccagaataccgataggccctacgatataatccgcctttctggcattcaccactaccggattctctcctgtggctgccttatcggcgccggctttcagcatggcagaggtagctgcgctgttggttcccaccgcgatgatctcggcctgcgccctcccctgtcttctccatctctctatgaacaggctgcctacgcggcctccctgtccgtctatgactactatgaccatccctttgctgttctccatgtcttttcacccttatgtatatttaccgggcgctccgggcccgacaagatatttctttgagtatactaaagttcaggtataaatgtcaatttattacaccctttcggaacgcttcatctgttataagcctgcgggcgcgtcgagccttctgacaaaatcactcatggccccggcgatctcaagctgctgaggacagactgcctcacagcttttgcatccgatacatgcggacgggcgtttctcttccgggatggcatccaccgccatatgtgtgatcagtccattcacaaatcgtgtctcattgtagagcgacaaaagggtcgggatatcaagccccttcggacagtgtgccacgcagtagcggcaggccgtacacggcagaatatcaagcatgctgtccgtcacttccataagcgctttcatctcttcttcgctcagaggtttctcctcggcacaggtggcaatattttctttaagctgcgtcatatcggacatgccggaaagaatcatcgtcacgccgggaacagactgcagaaaccggaatgcccacgccgggatcccttccttcgggcgaagtccgcgcagcatgtcgctgttctcctttgagagctctgccagcttcccgccccggaggggctccatcacccagatcggaatatgatactcattcagaagttctacttttgcttttgcatcctgtaacttccaatccagataattgagctgtatctgacagaattccatcttgtcaccatatgcgtccagaaaacgtttcatcgtatcgtaccgcccgtgggctgagaaaccgaggtgcctgatccttcccgcttccttctgctttgacagatactccattataccgtacttttcgtccaggtatgggtctatattcttctcatatacattgtggaacaggtaaaagtcaaaatagtccacaccgcatttttcaagctgttcctcaaatatctcctccaccttatccatattggaaaggtcatatcccgggaacttcgtcgccagatagtaactgtcccgcggatatctggaaagaagctttcccgtcaccttctccgactcgccgtcatggtaaccgtaggccgtgtcaaaataattgatcccatggtcgatggcatacgcaaacatttcggccgcccgctcttcatctatcggcgcatccggcccgtctcccctgagaggaagacgcatcgttccaagtccgagagccgagagttttaaatcgtgaaactctttatatatcatatctatttcctccttcatttccttgctgcatactaagcatactccctggagcaggctccaagtcaacatatttttactatttttttcttcatccttcagcatttgattcattgaacgttcatctttatcatagcctactagtctttgaatcagtgagacttaatgccactctaccagtttttaaaagagttctttcatcctcttctaatatttctatagccttgttatgcaattcaattgcaggattatagtcattggaagaactttcaactaataaacgcgccaaatgattataatagtgtggattacgaggataaatctcaattaacttttcaaacagtttctttttcttaatagtctcaggaatttcctctgtccattttgctaaatgggtatccataatatgttatagtaatatttataagcttatggtaacatgaaagaaatttataaatggcgctcatgtacaatgaccggaaggaaatttatattttttgatcgagcgacaaattagaatttgtggaggcgaggatatgagtaaagaatatatgataccagcgtgttcaggaataaaaattgatgttaagcaaggtcaaaatattacagtaattgatgtggagggcggtcaagtagttgatttttttgcagaagtaacaggtaagaaaaatgaatttttatcaacaggagtgacgattgactgtaacgagtctttgaaattaaaaatcggagatactatttatacgaatctgtatcgttctatgatgaaagtcctttcagatgatgttggagaacatgatttacttcacccgtgttgtcgaccagaaatgtacgattttttctatcataatggcaaagaacacccaaactgttttgataatattaacaatgcccttgccgagcaaagacctattattacgcctgtcaatctatttatgcacacagaaatcaatactaacggcagtatttcagtggaaatgcctatttccaaagccggagataaaattgtaataaaagcattgttggatattacgctaggagttgccgcttgcagcgtatctgaaagtaattgtaatagtggtaaatgttcacctgttaaaattattattgattaaacaactttcagtttagaaaaattagaatttggaggagaaaataataatgtcaaatttagaagtgaacatagaatatatcgaacaacaaacattatacggattgtggcaaaagtcaaatgataaaaccatttcaaaagatataaaggctctgtctaaacagtatcatgctgtggtttcaatgccggagggaaaggtgttaccctattttgtcctgtccagaaattacaatgagcaaagccacgattttgaattgtttattggcagtgtgattgaaaaaagcgggttagaaagctacgtcctttcagccagcgagtacgctaaaatcacagtaaatcctaaattgggatttttgtggggtgcttctattggagaggcaaaacaatatttctatacaaaatggttgcccacaagttcctttgaagcattgaatttggaatatgagtatcacacagaaagaagtaaggaaaagcaaccgacgattgatattatctttgccattcgacgaaaagctatcaattaaaattaaacaaaatgccaccgtaaatgaattaactgttttatcaattttagaaacacataacgcacatatgatacgggaaggtaaagataaaaaggaacggtttaatacattaaaagaaatagcggaatatcaacttgggattttaaatacagcagaatatataaaaacagatgataaaaataaaagtattacctgatggtatttctaacggaggtgctaataataacttccagataaactgaataaagttttcgctaagaacgggaaacgaaaacagaaagcctaatcaaaatttatgaaggaggaaccaaaatggaaaccgatataacacaagaactatttacctttatagaacgcagcccgagtccctatcacaccgtcggcactgcggcggaaatgctcacggcaaaagggtatgaacggctggaagaacaatgtacatgggaactgaaaaagggcgggcgctattttgtcacaaggaatctgtcctcgatcattgcctttcggataccggaagaagcgtgcggcggctttcacatcatggccagccacggcgactctccttcctttaagatcaaagaacacccggaaactgtttccgacgggaaatatgtacggctcaacgtggaaaaatacggcggcatgatcatggcctcctggctggaccgtccgctgtctgcggcaggccgtctcctcgtgcgaaacggcagcgccgtcactacccgccttgtcaacgcggaccgggacctgcttctcataccgaatcttgccatccatatgaaccgtgaggtgaatgaaggttataaatataacccgcagaaggatatgctgccactgtacggtgagttcaccgcgaagggtacctttatgcagcttatggcggaggcggccggcgtcagcggggacgatatcctcggcagcgatctcttcctgtacaaccggatgccgggcactgtctggggagcggacgacgcatttatatcaagcgcaaggcttgatgacctgcaatgtgcgttcgcctcactgaaaggatttctcacttctgatgactcctcatgcatcccggtcctgtgcatactcgataacgaagaggtgggcagtacgagcaagcagggggcggcctcgacatttttaagagatacgctgcggcgcatctgcaccgcgtccggcaaaagcgaagaacgttatcatacgatgcttgcctccagctttatggtgtcggccgacaacgcccacgccgtgcacccgaatcagccggacaaaacagacgagacgaaccgcccttatatgaacggaggcattgtcataaaatacagcgctaaccagaaatatacgacggacgccgtatctgcttccatatttaagatgatatgtgagaaggcggacgttccttaccagtcttttctgaaccgctccgacatggccggcggctctaccctcggcagcatcgccaacacacagacagccatgaatacggcagacattgggcttgcacagcttgccatgcactctccatacgagacagccggcgccagagataccgaatacctggtacgggcgtccagaaccttttatgagagtgctgtgacatgtctcggggacggcagctaccgcgtttcctgaccgagttccccgacggcccctgatacgctttgactatataaaattggatggtgaagtcttatgaatattacaataaagaatgaactcgacccactgtttgagatcttttctcttcttttgctctgccacacgcagaactggaaggaggaactagtctctcagctggatgactatggtgtcaacggcagagctttttttgaagaagagctgaacgtctttgaaaaatatgtggacacattccagaaatatagagtaaccggacgtgaggagaccgctttatttgaacatgtttcttatgacacctctcttctcatccttgcactggcagtcgagaagcgctcctgccttgaacatcctgaaaacctggagcttcaggagctgcgcagccttctggcttattttataacagataccggcgaacatacccggcttcctgaaacagcggaactaccgaacctgccggacgaaaatgctctgcttgactttatggatactgcagatgtaaaagacgaggagaaatggtttgtactgaatctcctgagaaaagccgactattggctttcctgcctgtttgagactgtaaatgccaataaaaaagcatatgataaagcactggaagccgtggaaaagccgctccttagcctgctcgaacagtcctcttcctgcagtgacccggaatttctcaagatcgccgggacttgcgcggatgctcctctgcttcggcctacgcttgcaatgccgctcattcagatcgttctctacaagtccggttattttggtcttttcactgaagcgcttgccgcaaacgaggcatcctgccggcagtcaaaagatgctgtgctccggcagctcaaggccctcggggataaaagcaagctggatatcctctgcgccctgagagacgatcacatgtataacttgaagctgtcggaacacctcggactttctccgtccaccgtgtcccatcatatgaacgtgctgctcggctccggtttcattactgtagagaaaaaagagggcaaagtctactactgcctgcacagggagcatatttcccagttcatatccgccctggaacatatgctcatatcatgatacatgtaaaaccggtgttccggcatttctaaccgcccataaacgtccaataacgacatacctttaaagagactgtacagcgcgcagtctctttttatttccataaaattaatttgacttgtatcgaattctatgatattttatattcatgaaacatattcgatttgtatagaattataataggaggatatcatcatgaaattatacgataaaaaaggacgcctgctcctcgcctgcacattgtttctcggcggaatatcggccgtcctttcagcttttatctcacttcttcttcagaggatcattgatgccgcagtgaacagcgatatggccgccttttccagcctcttcttcacaacgcttatatatctcggtgtactcggcgctatgggctttctggaagcttactgcggtaaacttatgatccgaagtatcacaagaacgttgagggatcatattttcagcggcgtgatgagccgtactcccggctgtttttcttcccgtaataccgcggattatctctcagcgcttgtcaacgacgtcaagcttgtagaagaaaatcacctcataccgtttctgctctgtgcacaaatgggtgtcctgtttctcacaacgcttggcatactgctctatttaagccctcttgtcaccgcggtactctttctctttctcgcactcatgttcacagttcccgcactgcttgggaaaaagatgcagagaagacaggatgcctgctcggaaaaactggctgacttcacggccagggccaaggactttcttaacggttacgaagtgatacgcgcttattcgatgcgcccttacatattaaaaaaattcacccgcatcaaccaggacacagcggagaaaaaactgcatgccgacacgctgcttgccgtcaacgaatccttctccgatgtactgtctgcggtcagtatacttgtcatcgtgttcgtgtcttcttatctcttgatgaaaggccagataacggccggaacgcttctcgctctcatacagctgagcggcacatttgtcacacccgtcgtgatgctcatgcagaacatacctaaaataaccggtatcaggccggtgcttgagcacctggaagaattctcactcacttaccaagaagcagcagaggaagaagaccttcccgctcccgccggattaaaaaaaggtatcacctgttcaaatgtaacctttggctacacgccggaacagccggtactaaaagatatcagctttgccgtcaccccgggtatgaaatgtgccctgctcggagagagcggcggcgggaagacgacgctgatcaggctgttgaccggttattacactgattttgaaggggatatatgctatgacggagtgtcggtaaaagacctgtccccggacagactgaaccgtctggctgccgtgatccatcagaatatattcctctttgacacagatatctgcgaaaacatctgtctcggcagtaccttctctaaggacaggctggatcacgccgttaaagccagcggaatatggcagttcctgccgtcccttgacaacgggcttcacacgagaacaggggaagacggccggaatctctccggcggccagcgtcagcgcatcgctgtagccagagctctcatccgttccacgcctgtgatcatcctcgacgaagggacttctgccatagactgggaaaccgctcatgaaatagaggccggcctgcttgcacagaaagacctcactgtcataacaattacacatcatatggatgcatcactcctggactgttacgacaaagtatactgcttaaaagacggcaggctttccattgcctgaaaaaccgggaaagcataaaaaacaaaagatcaggctgagggaaatgccaaaacaaactcactgccctgcccctcgccgctgttcacacggacgaaaccgtcgcacaaattgcagacatgccggacaagactcaatccaattccatagccgttcttgttcaactccctgatctggtatccgtgttcaaataccagttccgcttcttcttcactcattcccataccatggtcccggatgcggagcagtacgctgttatgctgctgctccaaagtcacctcgatcaagctcccgtcaccgtatttgacggcattatccagtaaattgtcaaccgcccggcgcagccactgttctttgcccagaattccataggaggcatcttcatcgaagcaaaagctgaggttggaataaacgcttcggtaagtatcacattcttccgccgcgatcagcgccaggtccaccatttcacggctggcgtcccggtgcgcggatatggtcagtatatcatctacagactgagcaagcttctcgatatcccgaatgagcaggggatcggaggtctcattgagccgcgcttttatgagcatgatcagatttttctgcccatgggcaatgaaggaatgcagacgctgctggtctttctcatatgaagaaagccgcgtatggatgctctgatactcctccttcagatccatttcccggatgcgctcaggctctgactcagacaactcccttaagtcactggcaatgatcctgttatgcctgcgttccagcacgcgtatgcaaaacagcagcccacaggaaaacaaaaggaccagcagacaaacgcctgcgatcagcaaaggcagatagcggaagaaggcagagcggaaataatcgtgcagctctgttgaagtgatagaactgttcaggacgatctgaccgctttgcggggcgtagaacagtgtctccggcagcccgctcatatccgcgcctgaattgcgcacaaagagataaaagcatgcgataatgctcaggctcagcagaatggtatatccggcgatcataaaccaggtttgcttttttattccagacaaagataatacccctttcctttttcattgcgtagaattgacgtgtctcccattttaagttttttctttatgttggccatatggacccgtatgaccccggaaaacggattgaaattctcgtcgtatacatgctctgccagctcctcgttggaaacaatgcgtggataacagcttgccaggtattctaaaatatcaaattccttagcagagagaggtatttcccgtccatccagtgtaacccgccgggtggccggatccaaagacaattcttcgatgagaatgacgggattcgcccgcccccggaaccgccggatcactgcctggatacgggcatccagctctgtgaactcaaaaggctttgtgatatagtcgtcactgccaagctgcagtcctttgacccgttgttccagctcgccccgtgcggtcacaatgagcacaggcgccgaaatcccctgactccgccagtcctccagcagttcaaagccatctctgtccggcagattcagatccagcaaaatcacatcgtaatcattatctgaagccttcagatctccactttctccgtcataggccacatcacacacatatccgaaaccggacaatttccccttcatcagatctgccagttcggtattgtcctcaattatcaataaacgcactctgatcacctgccgttctaaatttttatctatatagtataccacaggcggtacatgtacaaaacaaaaatataatttcagtaaattttacattcctgtcttgccgcagaattaacattgcctgtgctatactgagaaaaatcctgaaagaaaagagagaacactttatgtatattttaaaaaacgcgtttcaaaatctgtaccggaatgcagggcggaatctgctgacggcaggtatatttctgctggtcatcaccatgagctgcgtggctctcgtaatctacaacgatgcagacgccatcgcaaagcagtacagggaacggctgagcaccgaagtgctgctgaacgtagatgagaaaaaagtcagcgaggcatgggaaaaggatgaaacattcagaaaacctgaactcaccgatgaactgatccaaaaaatggccgcctccaaatatctggaaaaagccatgtacagcacccagatggaagctgtcgcagacaatctgaaatacaccacgccgaccgactatcaggatatggagatacagcgggcaggcgaagatcctgcaaagacccgcatcccccagtacacactcagcggatatgaggatgtgagccaggcagaaccgttccggaacggacaggcaaagcttgcagaaggaggaactttccctgctgcggataatgaatgccttgtctctgatacactggcagagttaaacggcctgaaacccggtgatactttcccggcaaaaagcatctattatactgacaaacagggcggtcctctggaagagatgacactcaaagtcagcggcatctatcaccggaaatacagcgaaggtgagacggacagcgacaatgaaatcttcacccgctataaactgctgactgacccgcgctatacttatgagcccacatttaatacggacttttacctgaaaaaccccagggatctgcacgccttcgcccaggaggcatatgctgccggcctctccgaatactacagcctgagcacggataccgttgcatacgacgcttttgtaagacccattgagcagatgtgcgtgatctccatgatcttcctgtgggtagttcttgtgctgggagccgcgatcctgcttatcctctcttcattgttagtgagagagcggaaatatgagattggcgttttgcgggccatgggcatgaaaaagagtaaagtcgcggcgcagctcgtcctggaatctgcgctcaccatggccgtttgtctgatcctcggcatcgcccttggcagtctgctggcgcagccggtcacagatatgctactggcagaccagatgtcccgggctttgagcgggccgactcttgccggaggtatgggcggcacatcttttggagggcttgcaacagataacaggccggtcactcatatcagtgcggcgctgagtctcacggccatctcggagcttacagcgatcgctctctttctgacagcggccgcaggggcggtcagcgcagcctgcgcgatgaagtatgagcctatgcgcatcctgcgccatagaaattgaaacggaggaattaaacatgtctgttttatcacttaaaaacgtgggatatacctacgagaaaaccacaaaaccggtatttcagggattaaatgcagattttgaaccgggaaaggtctactgtatcgtcgggaagtccggcgcgggcaaaacttcccttctctcccttttagccggactggatacctgtaacgaaggaacgatcctgtacgagggagaagatctgcgtaagctggacagagaccagtaccgcgcccggaaaataggcgttgtattccagagctataaccttttgttaaacaagaccgcattggaaaacattgagctttctatggccatcagcggggtacgtcataataataaccgcgcttttgccctgactctgctggaaaatgtgggcatcgatgaggagaccgccaggcgacgtgtgcttggcctctccggcggggagcagcagcgggtgggcattgcccgcgccctgtcccacgagccaaacctgctgcttgcggatgaacccagcggaaatctggaccgggagacagagcgggacgtaatgaatatcctggctgatttggcccatgtgcagaacaaatgtgtgatcattgtaacccattcccataaaatcacacgctgcgcggatgaaatctggggactgaataaaggcggccgtctggtttacatggggaaaggaggtgaggcccgatgacagaaagaagaaggcagtacatcggcatcgcctgcctggtccttggtctggcgtttgtgggactcgggctgctccgaaaggagcatttgacggtgttgaaaaaagcggcggcgatctgcctggaatgtattggaataggttaggagcgacatatgaataacaaaaaaagaacaataaacaaacagcaaaaaaagggcatccgactctgggtgcagattatctttgccgcactgacaaacggctatgtgaatggatttatccagtcgaaaatttacaccgggcccacaaaagcgctctgcgtaccggggcttaactgctactcctgccccggcgccctgggagcctgtcccattggttcccttcaggcggtcatcagcagccgcagttaccagttttccttttacatcgtcggtttcctgatggctgtgggcgccttatccgggcgggtagtctgcggcttcctctgtcctttcgggctggttcaggatctgttacataagattcccgtgcctaagctaaaaacactgccgggagaaaaatatctgaagtatctcaaatatgtcattcttgcagtattcgtcctgctgctgcccatgttcgcagttaacattatcggccagggaaatccctggttctgcaagtggatatgtccatccggtactttactcggaggcattcctctgacagccggaaatcctgatctgcaggctgccattggccggctgtttgactggaaggtctttctgatggtgtccattttagtattctccatgtttgcctaccggcctttctgcaggttcctctgtcccctgggagcagtctatggcgtatttaaccccgtttccctctaccatctgcacttggacgaggataaatgtgtaaactgcggcgtttgtaaaaacacatgcaaaatgggcatcgatccccgggagacaccaaacagtatcgaatgcatccgctgcggcgactgcgtccgggcctgtcccgccggagctcttaccaaaggctttggaatcggcagaaaaccggagacggcctgttcagactcctgcgtttcctgttccaaaagctgtggtggaaaatccgttttaaaaaagctataaaaactaacaactagtcattaagcaaatgaaaggaaaataatatgaaaaaaatattgacattcattctggccctgtgccttacagtttcccttgctgcctgcagcagcccttctgcctcttcctcatccagatccacgtccggcggcggcaaaagtcccgcgaaggacgtaaaagacatagtgaaagaggattctgtctccgatgaagaacaggaactgatggaccgcagcgtccgcttcacaaaagataagctcctcagctatgccacatggaagaaagtaatggagctgcccggcgtggactgcccgaaccatatctcaggttatattgacgatgtgtccatgggtgacacaaaagatctgcgcctgagcggcgagcctgagctggatgaaaacggtctttttgtcacatatgaactgacagaaggcaaggttccagccgacggttccacaggaggctgtgtgatcccagaagccctcgctaaaactatggggaaaaaggtgggcgataaggtgaccgtggatactgctctgggcagagcggaatatgagatcaccggactgtacggctacagcgaaaaaggcaaggtggggggactcacggaagaaaactccccgctttacgaaattttcgtgactcccgaagatatagttaagctgaccggcacgaaaaaagacggctatttccttggcgacaccgtcacttgtgccacggccaaagaggcaaaagaactggtgaagcaggcatctgcaattttgaaggatcatggcgctaaagcaatgctggcaagcgattccagcgcagatttgagttacgcggacagtgacgaattatttcagaatgttgcactggacggaaccgatcttaacggcaaagcgcttccgaaggatctgcttgccaaagacgggatcacgatggtgaatgtctgggccaccttctgtaatccctgtctggcagagatgcctcatctggaagaactgaataaagaatttgccgctgcagggaaaaatttcaaagttgtagggatagcagccgatgtaataaacgacaagggtaaggtcagccaggaacagctggatctggcaaaggagatcgtaaagaagactggtgtgacctatacgaatatcattcccggcgaaaagcttcagtctgacatcctgccaaatgtaaccgccttccctaccagctttttcctgaatgacaaaggtgaggtgatcaaaactgttatgggagccaccactaaagaagactgggtcaacacaaccaatgaacttttaaaaaaccttaaataaagtataaatctgccgaaaagatcaacaattatgccgccggctcatgaaaaaccacactgccggaaatactatatgatcatatagaaggaggctttatgttgaaaaaggaatggaacgatatatttgactattacagagaagagaaaacgatgacccagtctgaactggtcatcgccgtgctcacggaacttcaggctatagagggctgcattccaaaagaggcccgtgaggcggcagccgaactggccggtgtaaatcccggctacgtcagcgctgtgatcaaaaggcttccccatctgcatgaacagtctttccggtatgagatcaaagtctgtatttcagaccggtgcaagaacaaaggcggacaggacgtgctgaaggagattcagcggatcctgaagatccgccctgggcaggtgacacgggacaagcgttttctcctcactaccgtatattgtatgcattactgtaccaaaggaccaaacgtacagatcgacggcaggctgtttcagaatgtaacggcggcagaagtcccatccatattaaaaaaatattcctgagactcctgttcacatctttcacctatttatatgatatactgtctatcccgtacgtgcgtgccatttcgtaccactcctctatctcatcgtcacccggtgttttaaaagaatccgggggaggcaaaaggccaagctcttcatattttcctgccccgtaagtgtgataaggcagcagctccagcctggcccgcggcgcttctctctttatgaattcaaaggtgctttccagattgccgtccccggtgttcactccatggatgacgggtattctcaccaccatcggaacgccaagaccggccaccttcggcacgttagagagtatcttctcatttgacactccggtaaacgccctgtgcttccggtcgtccatatgcttgatatcgtaaaatatcaggtccatctttccgaaaatatctttcacatcttcatattcaaactgcccgcacgtctctatggcaagggaaatgcccatgtcatacagacgataggaaagccggcgcagaaactcctgctgcacagtggcctctccgcccgagaaggtcactccgccgccggatatccggtaaaatatcatctgctttttcaccttatccaccacttcctccactgtcatacaggacgtcatggcattgtgaagcgactgtccttccgggtttgagcaccaggcacaggcgagcggacagcccgccagaaatatgttcgtccgtatcccttccccgtcattgacggaaaagttctgtatattcatcacgtagccgccggacatatcgacatccctccacagacctttttttaaaattccgcatgctccgtcctcgcgatgatggcatcctgcatcgatctggacagattgacaaactgcgtactgtaacccgccactctaacaagaagatctttatactcctgcggccttgcctgggcatcccgcagtatcttggaagacagcgtattaaactgtacatgaaacgcgccgagcgcaaagaacgactggatcatcgcgccgagattcgcctgccctctctttgtcgccaccaggtcgtgattgagccttaagttaagaagcgtaccgccggaatgtatctcctggttgacctttgccgcagagcgcatggccgccagcggtgtggacgtatcgctcccgacgtaaggcgacacgccttcactcgacggctccccgttctttcttccgcacggggtggcgccgagcacgcgccccataggtatataattggagatccccataaatgccgtgttaaacggagaaccgaacacatccttatactggtggatctcccggtaataccagttggcaatctcaatcgctatcttatcgacataatcatcgtcatttccatacttcggaacgtcctgcgcctttttcctgagttcctcatatccttcccagtcggcagccagcgccttgtcaagttcctccatagtcgtcactttgtcttcaaatacgagcttctttatgacggccagtgaattagccacaacggccaggccaattcccgtgatcaccggccctacgttatattttgcgccgccgttgctcagatcctttccattttccatgcacgcctcgatacaggaagacaaaaacggcctcggcaccatctcctgatgcagcttctgggccgtcaccgtagcgatgatggaatgccggcaaagattctcaaactgcctgaaaaacgcgtcctttacttcttcatatgacgtgaattctctgcacggcttttccgaaagtcccatcttctccccggtcatccggctctttccttcattcagcgcatattcaagcgcacagccaaagttcacattcaccgccgctgtccactctccggtcttgcggtaatgcggaacgacacagccgcagttgttccagtcccgcgcatcatccggctcatatccggcattcagaagcatctggtatccgacactgtcgttgtgaatagccggaaaccctgtccctttgctcacaaggtgcgtcaccgcgccgagaaattcctgtgggcagtccgcgtggatccggacactcagtccgggctgatgcgtctttacttcctccgtcgctttcagggccatatacgtgatgtcgttcgtggcgtccagaccctctctcgtctttcctcccacggtcaggttctggaactgattgtatcccgcaaagtaatctgccgtgttggcggatatcgtccacacccactccgaatatttcagccagagcgcctcgatcagttcctgcgccatatcctccgtcaaaatgccctttgccttatctgcctcatagtacgggttcatatactggtcaaagcggcccggattcagggaaaggggattctcagacagaatgcccccgatctgcgtaaaccacacgaactgtatcgcctcataaaaagtctccggcggaaattccggcaccctccggcagttcgcggcaatgccaagcagctcctctcttcttttctcatctttttgttccccggccatccgttcggcctcatcggcgtatctgttggcaaagcgtatgataccttcggaagtgaggatgaccgactgatagaaagtgatcttatccatatcttccggcacagtcttatcaagttcagccatcttttcccgcgcttctcgtatgatacctccgaagcctttgacaaaaagtacgtcctgataatccggagtaacctcgccgactgcctgtctccatttggaatcattgtcgataacgccggtatctacgccgatcttgtacgtttcttccggtactcttgccagaaaagcttcctcaagcgatttatccttccaatagggaaaaatcttctcccggacgaacgctctctgctcgtcagtcatcacatacggatcctgcggccttttatcaaatccgtccatctccttatcgacccagagccaggagaactccggggtcaggatgccgcatttgcggaactcaccgaccgcgcctacgataagttctccgtcaaagatatgtacggtaagcttgtcgcacgtgccatagaatgcctgggctcttctcacagccacatgcatgccttcggtcttcttgtgggactccgtccacaggtaagcccgctcgcacgagatcgccggtttggcattgacataattctgtctgattttttctattctatctgtgatcataatgcttccctccatggttgtcggatcgttgcttctttatatttacattatattcttcctgccgtatataagtcaatgaaaaggcggagccgtgaatgatcactccggctccgcctgctgtctcaaagactcgttttatttattgtactgctcacgatcagcaggccatgcatttatgagaggaattatatccgtcagagactttaccgtcaagactccttccaggctgctttttcccccgcggtctacgagaacaggctgtatattggccgctttcgctccctccacgtcggaagaaacagaatctccgatatggatcacttcatccgcgctgcacccgctgacctccagcgctttttcaaacactgccctgtgaggcttatatgccctcaccatatcactgcttatgatgccggccggatgcaggtctttatccctcatactttcctcgatatatttgcccgcgttattacttataatgtagataggaagaggacactctttaaagaatgccgccgtgtcttcatatgccggggcatacatccagaaacgctggaacgccgcgtgcagctcttttggattctctttcaggtggatctctttttcacatattttcaaaagttcctccacgatatcatcctctgacatatagctgctgccaaaactcttttcctcatattcgttcagcagtctccaccagtaggccaccatggcctgcgggctttctatatcactgttttcgtaggttctcctgatcacctcccggatatccggcccctcctctttgataatggtgcctgtgtaatcaacaaatactgcctttaacatattcgctccttccaactcttatcaccgcacaaatgacagtgttcattattaaatcatcctctcaaatgcgatccggtcatctccggcctcgcatccttccgccagcacgatactgccgcactttacaaacccggccttctcaagcgcacgctgcatcggaatattgcccggatgtgtgtcgatccgcaccgacgaaagcccggcctcccgggcaagcctgaatccatgcgcaaacatcttccccgccactccttttcctttacactcgtcggaaacgcataccctgtgcatggatgcatacggcccgtctgtcagccagctgccgtcgatgaccgcataagacgggtcgggatctttctgaaacgcaaagatgccgaggatctcttctccctccactgccagaaaagtacatccgattcttatatcatcaagccacacgtccctggacggataccctttctgccactggtcaaggcccagatccttaagctgtctcttcgccataccggttatctcacacattctgtctacatgttcataacgtgctgtaataaattccataccattcacctcttgcctttcatatcaatatgtctatgcttacgatacgcctgtcaactcactctccgcccttcctaccagccgagcagctggcgcagcaccttcgtcttctcacgcccgaccgacaggatatcctcctcaaacccctgcatcttaagtccaagactgttgttcccccacggaaatacttctcttactttgtccaggttgatgagatagctcttatggcaccggaaaaagcgctccccctcgagccgcttctcaaactctccaatgcttttcccgtcaaagtaatcactttctccggcatggatgatgcagcctctgttgtgcgtctcaatgtatacgatattgccgatgtcctcaaatatcgtcttgccgtcattacttatggcaatcttttttagattcactttttccgtttcccggggcgcagacggccggactctttccagcacttttttaaggcgcccactgtcaaagggcttcaaaatatagtcgtccacaccaagctcaaatgcctttaccgcatattccgaatacgcagtgacaaagatgatctttgcgtcctgctgcatatttttcagcgcgttcacgaggaccgtaccatttatatctcccagattgatatcgagaaagaacagatcaaaccggcccgaaccggcaagctccagcgccgccgcgccgcagtcgccttcctctatcaccgcttccggcacgagttccccgagctggtgccgaagttcacttctcgccggcctttcgtcatcaataaccgcaatccttatcgccattcttatcttcctttcttgaaacaaagctcaacacagcttccgtctcctgaactcgatattttgatcctgccgtcctcaccgtatgtacttttcattctcttatacacattactaaggccgatgctcctgccgacagtgtctcccttttcgagcatatccgccacctctgccgggaacccctttcccttgtcgctgatacgcactataaattcttcttccatctcttttacacttatatttacgatccgcttcccttctcggttgataccgtacttcacggcattttccactaccggctgcagaatgagggtagggatcaatatgtccatcttactgggcacatcatacgtcacgatcagcttgtcctcaaatcttcctttttccagctcgaggtaatccttcacatggctgatctcctctcccatcggcaccatgccggcgctgccgtccagattataccggaagtaattggcgaggatcacgagcagctccctggcccgctgtgcgtcctccctgcacacgcacgatatcgtattgagcgcattgaaaagaaaatgaggatttacctgaaactgcagcgccttgagctccgcctgctgccgcatgatctcctggtgttccagctcagccatggcgatctggaatgacccgagtgttactaggtgctgtaaaagttcaagctcacttttgcggaacacccaccgctttttcatccatacgataagacagccgacggatttgcccttaatgacaaacggtgccgcgatcatggagtattctttcatccactcataccaggagctgcttcttggcacattgtacattgtggacaggctgccagtctgcattgcgtttttaccgacccttggaatactcgtcagatccccgggctgaaactcctccccttcctgctgccactccagaatggcggtcctgtctgtgatcatgacccccatccagtctgtctcactcaatatcacagaggccagctcatgcatgttttctcctttgcttatcccgtggcgcaaaaggggcaggcacttctgcgtaagctccgaagcctgctgcagctgccggctgctctcaatatcctgctggataaagacgttgttaaagctggatataaatatcagtatcccgatggagttcagcacgatcatgggaaccgctatctccagcaccgtattgagcgcatcggcaaaaggactcgcaagccttagaagggctatcatgtcacagaattccgcaaaacaggcgagcagaaacagatccctgtatttccatttccccctctgaaaatacggataaaatccgcctccgaggagaccgaacaatacagtggaaaatgccgacgccatggcaaacatctgaggttccgagaaaaaataaacatacacagccccgataaaagatgcatacaggcctacgatgggacctccgagtatgcctgaagtcatggcgccgatcacccgggtattcagactgtatgaaccgatatcaatgcctgtatatgtcgagagtacgataatgcctccgaacacaagggccagaagcacctgactcttaaaactgcggcgctcctgctgaataatattctggatgatcttcagcttggacagcagattcgcgacaagtaccagaagccctatattcagtatgagctgaaagatcagattgtctgtctgcatatgcaacgctctctttccggcctgcccggcccgctttccgcgccttttttggcgcttcttcatgtatttctatgataacacaggcccccggcctatcgcaaggatatgccgggggcctgcaaaagctttgtatgattttttctgcgtccgtcaaatttatttaaaacaaatatttaatatgtaacttcctttactccgttgtacacgtctctgtcaagttcgcccagtttgctcgcaacgagcatgccgaccatgacgtccacatcaacgttcatcagtgtcctgaacatgcctgagaaccagtcgatgccgatcagtatggcaatgctctcaagcggcagcccaagcgaagacgcgaggaacgtgtagacgatcaccgaaccgcccggcacaactatcgtccccatgcacataaggcaggagagcaatatcgccatacccatctgatagaccgtcagatccacgcctgtagactgtgccataaagaatatggcgacgacataacacatggcggctccgcagctgttcatggacattgtgatcgggcctgtgaaatcggccaccttgcggcttactccaaactttgtgaccgcgtcctccatctttgtcggaagacagatggctccggatgtggtcgtgacagccatcatagacattttcgcgaatttcttcggcattctggccggattcactttacagagggtggcggtgagcggaccgtagatgaggaactgtacgatatctccgatcaagagcacaccgaggaacttgagcatcgggatgatgactttaaatccggtggatccggcaacgtctgcaagcaggcagaagatgccgacaggcgcgatgtgcataacagtcttgataatatttgttataatcgcattcagtcctgtcacccagtctgccatgttgcggttcccgctctggcgtgtgtaggcccccatggccacaccgaaaaataacgcaaagacaatacacggtaccatcgcgctgtctgccatagaaccgatgatattcgtagagacaaaacctaagaccgtatcctggagggatgtggattctacggccgcatttgcgatatcttccgcatttgcgatctgtataccgacgcccggctggatcagcatggacaacgcgatgccaaggctggctgaaattattgtaaacagaatgatccatttgaatgtatgaaagcccatcttcccgacatcctgtccgtctccacttcctacggccgccgccacggcggacatgacaagaaggatgacggacatctggatcagacgtatgaatatatcgccgataaatttaatatttgacgcccacggaccgacaactgcaccaaatatgataccgccgatcgttgcgatcaatatctgtgtcgtgagggatattgatattttctttttcttttccactttcattcctcttttctcattttctcatactctcgtctcccggccgggcagctgtttcttatacatatataatataagaattctgcgatctatcaatagctttcgtttgaaatgtcggtttttctgtcttaaatgatattttctatgttttaaaggaaagcatactcgcttccatttttttgcacggcaaaaaccggctggaatataccagccggcgcatatgcccgatttgaacgcaccgttactatgaagcggtcatgctgtccgcaaaagctcttaccatgagcattgcaactgccgcccctgcgtcttccgtctgtccggatctttctctgtgcgcggccgcccttccgtgaactgccgtgagcgcggctgtagcatggaagcctttctcagctgccgcggacgccttccgggcggcttcctcaagcggcgcgccctgatccagctgcgattccaaaacctcgcaggcaggatggaacgcatccagaaatgtcttatctccgacctttgcatgtcctcttttgcagacgcctgtctcgtatgctttgaaaaatatgatccacgccgcgtctttcatttcttctgtgtcccgcagctctttacctgcttctatgagacctgacgccatcagagtccccatcgtagacggcactttctcagccatgacttttcccgcagtataacacattctgccggcatcagtctcttccaaatcttttacagcctcataggccgccctgaaaccatcgctcatcgtcagtcccagatcgccgtccccgacaatgctgtccagcccaatcagatattccctgttgtcttccattgtattcttaagctgccttaaaaaatttaccaattcatttttattcatatccagatcctctatttctgtataaaaaacggagtgtcagccggcgcgtcaatgtatttcttcaattcttcgtccactttcagcaggctgacagaaactcccgccatctccagagatgtcgcatattcccccacataataacggtgtaccttaagccccttttctttcagcagcgcgtctgctctgcggacaacgatatactgttcgtccagaggtgtcgcgccgagaccgttgaccagtaccgcgacctcatctccctctacataggggaggtcctctattattttcccgagcatctcttccgtgatcttatccgctgtctccagcctgcctcttcttattccggtctccccgtgaatccccattccgatctccatctcatcatctgctatgtgaaaaccaggtcttccgactctcggcactgtgcacggtgtgagcgcgactcccatcgtccttacattgtctgccgccttctgtgctatccgctttacttcatcgagcggaagcatagcctcagctgccgccccggcacatttatacacaaagaaaatgccggcgacaccgcgtctcgtgcttttttctcccggctttgaaggcgcggctgacgccacatcctctcccgcgatcacgctctccactcttatatcatgctcgaagtcagccatctcagccgccatatcaaagttgaatatatccccattatagttgccgtagatataaagcacacccgcgcctgtatcgacagctcttgtgacggcgagcatctggttcgcgcccggcgactggaacacatcgcctaccgaacagccgtctgccatcccttcccccacatacccgagaaaaagcggcaggtggccggaacctcctccggtagcgatccccaccttgccttgttttctcttccgtttcacaaggcagtgtatatcatcttccacgtaggcaagcttgtcagaatgggcggtatagattccttccagcatttcttttatgtaatcttccggctgattgattatttttttcatctctgcttctccttatcggtttgtacaaaactgcggttctctgccttccagtacatcgatcactccctgtgcggtgcacatgctcacatttgtgtaggcttcgtacgtctccgccccggtgtgaggcgtgcatatgacatttccgcacttcagtatctctgcgtccttcatgagcggctccgcctcgaaggcgtccagagccgcccctgcgatcctgccgtcttttaaggcgcggcagagcgcaccggtatctataatggaacctctggcacagttgatgaggtacgccccttttttcatcatacaaaacgcagcgtcatcgaacagatggtgcgtctccccggtggccggaatatgaatgcttaccagatctgactttgtcattacttctttctgagataccattgttacattgtacctggaggccagcctggcatccggatacagatcactggcgatcacttccgcaccgaagttcatcagcttttccgccaccagacgggcgatcgctccaaacccgagcagccctattgttttcccctttatctcgtatccgacacggcgcacccactcaccgttttccattttcttatgcagcggtatgagcccgcgcaggactccgatcatcagtcctaccgtcagttctgctaccgcgttggaattctggcccggcgcattgatcactttgattccgtattccctggcctttattttgtctatattatctgtcccgacgccaaacttcgctatcacctttaacttgggggcgatcttatatatttcctcggtccagtcgtccagtccgatgatcgccccgtccacatcgcctatcacttgtgcgatctgttcatatgtataatagggcatatcacttttgttgatgatcagttcgtgcccgctttcttccagcagctgctttgcccctttgcacaattcttcataatgtgacgccgtaatcaatattttacccatccctgctcttcctttctcctaagccgttgtgtcgatctcgacccctgcctcacggctgatctccttaagctcttttctcagcctttcgatctctgcttcttcaatatcgagctgaggctttctcatgactcccgcgctgatcccccgcatcttcaggccttctttaaaataagacatattgctcccgcatttgagggcatcacaatattttacacatattttctggagctttctcgccgtctcaagatctccttcacagaacactttatacacccggacaaacggttccggaaagacgcctgcgatgccggataccgttccgtcgcatcccaatgccagcatacttgtaaacgccctgtcacatccgtggagcactgagaaactgccgtctttcagattcaggtaatcgacggtacggttgatatccgcaaagctatacttgatgcctattatattttcacagcgtgctgtgattttctctgccgtctctctcgatatatcatttgcggaacactgtggtatattgtacaggtagatcgggaaggaatcgctgacactttgcgccgctgtcacatagtattcttcaagctctctgtctgtcgccccgaagaacgccggcgtcacgatccctgcaccgtcggctcccgccttctcggcatgtccaagaagctgtatcgtatcctgctcgttcatggcgccgcagtgtataaaaacagtgactctccccgcggctgtctgtatgatcgtctcagcgatcttttttctttcttcaaggcttaaacggaacatttcgcctgtagtcccacatggataaagacagttgacccctttgtcaataagcatgccggtaagctgcctcactccgtcgtaatccacctccccgctttctttaaacggggtcaccattgctgctgttacaccatataatttcttcatttctttatcctgccttccttactttcttaatccttttctcacagacatgagaaccgatgccaatacgacgatgccatatgccattttctgtacgccaaagggcagattcaaagctgccagaatccccagaatgatcgtgatggtaaacgcgccggccactgtcccgagataattcccgtttcctcccatcaaagatgtacctccgatggcaaccgccgcaatggactgaaactgaaaattgtctccgatcccaagatacgactgccctacttttcctgccagcagcatgccggcaattcccgcggtcaggccgctgaccgcatatgccgtcaatgtcaccctccgcacgttgattcctgaataagccgccacagtggcattatttcctaccgcaaacaattccctgccgtatttcattttaaaaagcagcactgtcacaactgcagcgagtaccgcccatattatgatcaagtacggtatccccagaaagctgctctgccccatctttttgataaatgccggtgcggatccgcccggagcgccctgtgtcaccgccaccagacctccctgcaggaccgtgttcattccaagagtcatgacgatcggaggcatattcagataagcgatacagattccatttacaaggccgaagcatgtagtcagaaccaaaataaacggaaccgcccatgccagactttcatccagcccttttgtcacatttgttatcatgatagcagcgatgccgaccatccatgcgacggaaagatcaattcccccggttatgatgacaaaggtctgtcctatagccacaacgccgattatcgcggcttcggaacagagcacccggatatgatcgatacttgcaaatcccggcttgtagactgaaattgcagcgaataaaataagtgcggtcagatagcttatgatcaatgtctgatgtctttgtacctttaatttcattatgcaagcatctcctttctgtccttcacgatttctgacactgtagatatgagcaccgcaatgatcagaagaagtccctggaataatgtggaccagtaagaagatacccctgcaaatacaaggatgtccgcgatcatcttcaatacaagcgcgccaaatatggttccgatcaccccgccttttcctcccgtcagcagcgtaccgccaataactgaagccgcgatcgcctggttaaaaaacgactcacccgcggtaggtgaccccgacgtgactaccgcggtcctgtatacgcccgcaagagccgcaaatacaccggaagccgcataggcaaataatttcacccggaatacattgatcccgttcagtgatgccgctttatcattgcttcccaccgcatagacataaatgccaagccttgtctttttaaagtaaaaccacgccgctgcaaggagaagtataaagagaactgcgatcgagaccttcccccctattttggtcaccatggcgtcggcaaagcttgccggcggcttacctccgtccttgggcagtacgagataggcgatgcccccgcagataaaccacgtagagaacgttacgatgaaaggctgtacttgaaacttctggatcacgaatccgttgaagaggccgacggacagtcctatgagtatacacaggatactgaccgttaggatcgatacgccggagtccagcatataaatagccgaaaaactgtttgtcaggcttatcacccccgctatcgacagatcgatcccgccgatcagcagcaccatcgtctccccgacagccgcgaggatcaatgtcatagatgcctctgccttcaggctgatccagtctacgctcattgcctctgtctgcaatatacaggtcagcgccgccagaaagaaaaacagaagtacggataccaatgcagggtttttcttatatttcttatgtttgattacgctcatttcctctacctccgccctctagtttgctttctcgccgacggatacccgcagaatattctctctggagatcaattcccggtctatccttcctgcaattttgccctggttcattactactatgctgttgcatacatttacgagttcttccatatctgtagaataaaaaagtatccctttcccttctcttgcgtactgcttgatcacgttgaacatctcttttttcgttcccacgtccacacctctcgtgatatcgaacatgagcagtatatccggctttgttgccagctgcttgccgagcacgactttctgctggtttcctccgcttaaggtacctgcaagcgtctccgggctttctgcttttatggcaaatgttttcatcatctcatccacgatttctttttctttccgttccgagataaagattccttttacaacgcggtcaagcgccgccattacgatattctcgcgtatgctctgagccagaacaaggccctgcaggccgcggtcctcgggtatgagcgcgatcccttcccggatacatgccttcggattttttaagtgcacctctctcccttttatgctgatcgcgcctgttgtttttatgagaccgaacagggccataaataattctgcctgtccctgtcccgcaagtccgccgactcccaggatctcccctgccctgacatccaggtcgatctctttgagcttatgcccgctcgatacatttttcatggacacaagaatctcatcttttgtaaagcattccttcttcggatagtaaccgccgatctcccgcccgagcatcaatgtgaccagctggtctgaatctgctttctccatgggcagatcggccacgtctgtacctgaacggtacacgatcacttttgtgcacaatgattttatttcatccagacggtgggatataaatataattattttaccttcctccgccagcttccggatgatgttcataagccaggctgcctgtccgtccgacaacgcggaagtagcctcgtcaaaaataatgatcttcccgtcctttgataatgctttcaatatttcaagcatctgccgcttgggaagcggcagtgtgctgaccttcgcccacggatctatcacatccgcctcatatctatgaaataactcgattgttttcttctccagttcctgatatgacactctttttgacgctgaagtttcatatactcctaaaaagagattctctgccaccgtcaggtcgggaatgaggctgagttcctggtatacagcgcatattccctgttttatggcacttttcgtgccgtgtatctccagtcgttttccctcaaaatatatctctccgctgtctgctttatgttccccgcacagcacctttatcaatgtactttttcctgccccgttttctccgagaagtgctacgatctcacctttatccgcctcaaatccagcgttgtccagcgctttcacacccggaaaagacttggtgatatttctcatctcaaaatctgccatattgttctcctctttccccggtaccggccgtaatggcatgcacggctatgaccggcgctgccttatattctgacacaaacggtgcaaaggtactctgcctctgcaccatctgcatgatctatctgttatttacccaacacgacatccatcggtatctctactccgaagttccccggaactaccggccactgcagattatccggctggtcgctgaagcagttgacgccgtcctctgccacttctatcgccacgtctgagaattcacccatatcaaattcattagatgtagcaacataggccgggtcgatggagatgttcttgtcgatctcctctccgtccaggatcctgatcgcataattcagagcgatcgcgctgatccccggtatgtatacgtggatgatcccctggctgtcattttcaaggcatgtgagcagattaccattgtatccgcctccgcaggacgccggtatcttatcaatacccgcctttttaaatgcgtttgtcacagaagtcatatatccctgcgtgacaacgacatcaatgtctgagttggcagctatgacgcttgacaatgccgcctctccgtccgcctccgcgtaattgctgataaagtcagatacgatcttcatgtccgggtaactgtcaaatatctcttttgccgcattatattcctgctcagacacggccgcccccggcaggccctgatctaacacaacattgccctttcctccgacagcttcggcaagccattttgccataaccttatatgcctttaccgcatcgatggtaatgtggtaggccgactcctctgaggccggctggtcaaacaggatcacttcgatcccggcgtctgtggcacgttttaatgcctgattgagcgctgtctcagaagcaggatcaacgagaatggcatcatacccttctttcacgagcgcgtcgatggacgctgcctgatcttccggtgagttctcacagttaacgatcttaagttcacatctgctcttgtacggctcctgctctgccgtatactcaacgatccgttccatctgctggcgccagtcgttgcccatgtaggagttgctcagcgcgatcttatatttctttccttctttttttacgaggctcgtcatatcctcacttgtgtccaccttggccgcctcttcttttccactgtccgacgaggtctcctgattgctctggcatcccatcagcatagtaccgaccaacgctgcgcaaagcaaaatgcttactaattttttcttcattctttttctccctttcttttttcttattcctgccatatatcatgacagtttgtgtatcattgaaagcttgcgcttatcaatttctgttttacatgccccatctgaaatggttcagttctctcgccccgtcctttgtgacatggagcatccgttccagtctgacccctgtcttcccggaagggcctgtgtaaagctggggctctatgcacacaaccatattttcttccaggaccgcgttatcgtgatacgtaaaccttggtttctcattcacgctggctcctatctgatgcccctgatagctgcacatgcgaaatccgttcttcttataggcttcttccattttcaaattgacttctctgaaggtcacgcccgggtaaactgcctctctgccaatggcatatacgtctttcaccgctgaaaagtaacgcgtctgttcttcatccggttcttcccagaagacgaccgcgttggaacagtcggcccagtatccttctactctcggactgatatccatgatggcaatgtccccccgctctacttttctgtctgagggaccgagcggataatcactgagacccgcccgcggtccgctcacgagttcccccacaaaaggagtaaggcttttgttctccccggacaccgctttctgaacctcaaaccagatatccagctccgtataatctccttcctttcttgagatctcatacagccgttcctgggccgcgtctgcgacccgggccgctctctcaagcagcgctatctcctcgggagtctttatgtaccttgcgcgttccatggaaccgctgatgttgacaaatgctgcatccggataagcttccctcagtatctcaaggacaacttgcggacaatgttcctcctctaccccgaccgtaatgcgcccggcagttccgatacaccggcgcactgcatcaagaagagcttttttgaaattttgcgccggatcatgacgctctatatgcgaaaacgaaggataacagataacttgtttctttccagccctttccagtctgcttttgtaaaaatcagatattacattccagagaacgccggactctgcgccaatacaggctgccgccatcggaagacctctgcacatatctcccataaaggccggccagtatggcacttcataatctcccgcataggtgacgtttgacggggaaatcaatacggccagatctgccccagccttttttagttcatcagttacttttttcattctgtccatcttttcgtttcctccgttacgaaatatgtttactaaacaacttgtaagcacattatatacctacattacaatttgtgcaatatagttgttttaccaaatatgtcatatgttttttgtgcatatctactatatattttcattttatcttctttacaaatccgtgtcagcaggaataatctgctattttccgtatataaataaagcgttccgaaactatttacgaaacgcgtttatctttgttgacttttttattttgcaatgagatacttagtaaaagacattaagttatggaggtgtgatgaaatgaatataagggatattgcagccgccgcaaacgtatctgtctcaactgtttccaaggtactgaaccagaaagaccgtgatataagcgaagcgacccgcgagagggtgctcgccgttatcaaagaatataattataccccttattccaatataagagagacacaggccgggaagagctttactgtagcgcttgtcattcacccttcgctcataaaaagaaagctcatcacgacgctggaacagcatctggccgtcagcggatacagtttactgctctgcacgctggatacctcagacttttccatggcccggcagctgaatgtgcttcgctcaaagcgcgttgagggcatcattttccacgccattgacgagcgttatatcgaagcctttaacaaggggaacagttccggcatccctactgtctttttaaaccaggaaccggtcaccaacaagataagcatacgctgcgactattcctccatagcgtatgccgcggttaagcttcttataaaccacggacattcccgcatcggctgcgtgcttgactccgcttctgacaacagcggcgcggcaaaagacggctatctgcgcgccttatttgagaattcgctgccgcgcgacgacactttggtcatttcctgcaaatccgacgcacacaatacacatgccacatatgagcagttatttgaacaggatatcactgggctgttctgccagaacgccgtactcgccgccagcgcctatacctttttacacgagatgaatatttccatacctgatgaggtctccatcgtatgcggtgagacgaatgaactggcccaaatactgtatccgcccgtcacctctgtggaactgccttatgacacgctcggacggctggcaacgagaactattttggacctgatcgaaactcacgcggagctgcccagatcacttaccgtggagcctgtcatccacaagggggacagcctcgccctcccgggtgcaagccgtacgaaaatagcggtcataggaaatatgaatatggatactatcataagtacggacaagatcccgtcccccggcgagcttattatctcaaataatatattcagcacccccggaggaaaagggatcaatcaggcgatcggagccgggaaactgggcgggtttgtgtatgccataggaaggctcggtgatgattcagaaggacacatcatctctgatacgctgtcttcttacaacatcaagaccgaaggtatctatattgacaattccacctccaccggaaaagcttttatcaccgtgccggacggcagcaacagctgtgtcatttcttatcctggcgccaacgctttttttgatgtggagcagctcaacaaatgtacgcaccttctcaccaacacagactattgcctcatttccaccgaattgtccccagaggtcgtcgcctatgccatcaagcgctgtaagaagcttaatgtgaaaatattcctcaaaccggctaccacgagcaagatagaacggacgctgctgagtaaaatagattatcttgtgccgaacgaaaccgaactggagcagctcgtccccggtcctgagacaattccggaaaaggcagaagaactatttaagctctgtaaaaatacgatcatcgtaactatgggagctaaaggctgttatttaaaaagctccgaatacagtcattttttccctgccgcgcctttctcacccgtagatacgaccggagccgccaactgcttcatcagcgctctggccgtttctctcggagaggggaacgatcttccatacagcatctgctttgcggcttacgccgccggtctgagcgtcacacagcagggaacacagctgtcattcccaagcagggcacagctcgatatttatcaggatgacatacacgccatgtatgtggagagcggactttaacgcggcgcagccgggccgcacccgcccggctgttttatgccgcagctgaaaaatacctcaaagcatcctgtctatgctttgaggtatttatattttgccgtcagtgtctttctctcttccccgccttcatcataaaacaattctctttcaaattgtatgttctcatggcggagacataattccaggaacaaaagaaagatccccatatcgatccggttgtagtatgtcaccttatgagcgggcatgatcccccgcctgccgggcttcctgtatctgaacactaagagacacccttcgcggttttccaccagccacggctgcgtattgcaggcgctgggcgcaaaccttgcgatgccggcagcattccctatatacggcccgtcccagatctcctccaccggttttcttttacttttaaacatatcttttctgaacttgttctcccgcacttttcggatcgcgatcatgataacaaattccatgttatctttttccggttcatccgcttttcctatgccgaaccagagcgccccgatattcagggaggcaaggtacagatcaagctgttcccctacatatccgatattctgcagataattgtcttttttctcgctatacagaagtaaacaatattcctgtcctcgcttacatgtcgtatgcccggcggaacatatctgcatgtcgatcctgatatccttatcgagcggtatgaattgtttgaatttttcctgaatgtgctgtaactcctctgatgttatcgcttcaccttcagcgcctctgaatacgtgaaatgatctgcgtttgaagatcatttcatataatagatcgtccattgctttcccctccgtataaacagaggatattatgatttaaaatataattcaaccttatttttaaaatattttaacattcccacaattactgccatatctgtatagcagaattataacaactatcttttcttcgctattatgtaggactgtaagcccttttggcacccatttttttcataaaactcctctgctccgggctgtgcgccaaaatacagcatagttggggtattttttctggcaagctggagaagactgctgccgattccctgtttctgatactcaggaagaacgagcagttccgtaattgttccaaaataatagccatctgtaagaacacgtagacagcccacaagctttttatcatcataagcagatatattcagcgtttttgataatgccgcctgcgttttatccacatcataatccccgggccacactctgtttacgaaagagataaaaactgaggcattaagcttctggtcatttacttcatattctatcatttcccgcacctccatagatttaaagcaaatctcatgaaactttgatatggctttatttgttttctaaggacaccggaaaaccatctgtttcttcggcaatccggtcgtcaactgagaacttttcctctttcattttcttctcagtaactctatactctctttctgccccattcttgtctatggcatatatcactatatctgatgaatcttttattgtttcgatcctgcttactttcatcatattttcagaaagtcttttatccttcgcagaaccgaccgccatgccgatgcacattcctaacgggattccaaaacacagtcccatagacatattatcagtatagatgatctgtccgaatactaagccaatggatacgccaaagcaaatcccaaggctcatatacatcgttgtatactttttgactgaatcttttttatccaaactattgatcctcctcaaactccaatctaccgattttataatttatagtgatactaattttcaagcctgttctatctcgaatcactgaatataacaggctttgtaagtggggaggggttgaatcccgaccaaatcccgaccaacaacaaatataagcaagcgacctaaactgtcagaaaggaaatcttgtatatccgtatattgtttttagagattaatttgacattttccaatacacttgttaatatataactataaaaggtgttaccgatagacggtttcccaatttaatcagttatataaaaagtaacctttccttggtcggggcggttacttttttgtatggtttatgtatgcaactaggatcgttacaatgattgcaagaatcattagtacgatggagagcatttcaaaatcactcatacattcgccctcctttcctagatttcacaattggataaaaccaatttagatttctatgtaatcagagggttcagtccctctgtcagagggcaaaccgcctattccgttatggtaacacctaattatattttaacaaagcaactgccaaatagcaatttaaactctctccccgtaattgactctggtaagataacggcaacagtgacaaaagctgccgtcacaaatattacaataccatttacaaaagaattttcagaggccccaatcctcactttttcatggattacatcacaaatgacagccaaggtttctcaataaaaagcgcaggggtaaaaagtgcagttgtaagcgtatatagttccaccgatgcgcatggcgttacagtttattggccggccatattaagttaattatagattattacatcaaagaggaaataaaaaaaagatcagtatgtagagagaacaaggtaaacggcggcggtattaccaaactaccaaagccaacctattttttaactcttaaaaaaacgaaaacccccataaaatgggggtaaaatcggagtgacgtgattcgaacacgcgacctctacgtcccgaacgtagcgctctaccaagctgagccacactccgttgtttagtttaccggatgctatacaaactgcatccggcgcccctgccaaggaactacggatagaggatttgaacctctactaacagagtcagagtctgctgtgctgccattacaccaatccgcaatacagctcgtcatttctttgacggaacaagtataattataccaaataattttcaaaaatcaagtccttttttatatttttttcaaaataccgcaaatgagtataactttcgtttcatctgcggtatttgaatgctttaatccctcaacaaactcgtaattgtgccgcccataattttgtcaaattcactctcgtttttggcataacggcgtattttattaaactcccactcataatcacaaaatggaccatccgtcccccagatcaccttgtcacctccaagtttttcaattaccttgctcgtctcaaagcccggaactctcgatgtctcgagataaaggttctcattttccatagcaacttctatcgcaagttcccattcccagaagaaaccacagtgagccatgatgagcggtacttttggaaatcttccggccatacggtcaaattccagcggacaattgtacaggtcagcagaaccgtggacaatcacaactgcatcataagcttgcgcaatttcaaaaataggattgaccagttttttattactaagaggaaaaccgcaaagtgtcgggtgcagtttaactcccttgaacccttttttaaaacaattttccagttcatccaatgcagtctgtccgttccacggatttaccgcacagaacggaatcaggcgttcaggattttcatccacgtaccccatgatctcattattattaaaatacccttctgtaaatggaaagatcacggtcttatccactttcattaaatccatcctgtccaccacgtcctgtccgctaaataccgcggcgcctttaccaacatgtgagtgtgcgtctaccttccacatatcgtcacctcctatgaatgtactttactttttaatactccaagcgctacagcaagtatgataaatataccattgaatatattcttatatgcaattcccatacccatcaatgttatgaaattacttataaatccgacaaacaatgctccgatcacgctgccgattatattaaatttatttctggacgatattaatgtccctatgtaaactgccacgaagcaatcggtaagatatgtctctgcacctctgggaaccgcatttccggaccttgatacgagcatgacccccgccagagcagcaaggacagaactgatcacaaatgtggatgcaaataccctgcgcacattgatccccgctaacaacgacgcatccacatttccacagaccgcatccatatgacgtccaaacaccgaacgttcctttgttaaatacatcactacaattatcacgatcgtcagtaaaatcaatactgatacagggccaacgctctcctgcccgataaaaaagaaatttttgacccggtctgcaggcagtgtgaataaaatctgcggctgtgccccatcggtgagcgtcaactcaacactgcgtatgataaacatcattcccaatgttccgataatagccggaactcccaggtatgagatcagaagcgcattgataagaccaactaacaggccaaaggccagggcacccaagatcgccacaagaaaatttttacctgataataacagcatagcagccattacaccagccgcatccgctacctgggcaatggaaaggtcaattcccctaactgccattaccatagtcattccaaatgtcatcactactaataaagtgcttgagtttaagacaccaagtatattatcgatcttcataaatctaggttctgcgatctgaaaagcgataagtacacagcatattccaattactgccccattttttgctgtaaaactgataattttctctctggaatgggacgtttctctcttcatttgttccatcattcatccctcctgattaaaatatcgtgacttgaccgatctcacgttttttgatcacggtcaataaaatggacaatatcaaaataataccgagcactccggaaatctgttgatttgaaatgccattgatgatcaaggcattggataaggcagcgataaacataccggaaatcactgtcccaatcatacttaattcacctgttttagaaaatgtacttccaagataagccgcagacaatgcctgaatgagaaagtccataccgcttgtgaccgcgctggccccatagttgtaagaacactgcagcactcctgtaaatcccaggatccctccggataaaacgtaggaatagagcagatacttcctcgtgttaagtcccttaagttttgcggccgcaggattttctccggcagcatacatccgaaggcctgtcattgtatgtttgaaaaaataattcaagatgaaacacataacgatcacgatcacaaatataacgggaatcactgcaattctgccttgtccaagcattgcaaatccagggatcactttaatcgtcaaagctttcccgtcattgtaccaggacgtgataccctgcatgacaaacatcgtgccaagggtagcaacaaacgttggtattttcacaataattacgagaaacgcattgataagcccaaccgccaaacctgctgtgatacctgcagtcagtgcaaataccgcgccggctccggcaatgatcatacctgccgccagattgcaagtcagctgcacaagcgcaccagcgcccatatcaaaaccgccgccgatcagcacagcagtaagtccgatcgcgatcatcgtaaggacacttccctgctttaatacattcatgatattattcagatcaaaaaataacggagcacggattccaagcatgatcaaaacgacgatcattccaattccggttccccggctgagcagcattgtaccgacttttgccggatctgtacgagtccttttacccaaaattattcgcctccttcaaagcagcatctgcttctcctcctgccgcccaatataaaatgtcatgttcggccgtctgacccgcctcaaactctttgacgatcttcccctttgtcatgaccgcgatccgatcgcatattcctatcaattcctcattttcagaagaaataaagacaataccgcacccctttttagcaagagctaccatctgcctgtatatctcagtctttgccccaatatcaacacccgttgtaggctggtcaaatacaaagaccttgaaatcacccgtcatccaccgtccgatcaccaccttttgctggtttccccctgagagttctcccacaagctgttttttaccggtgcacacaatgttcaatgcgtctcttatcttgtcaaaccggtcgttctccagctttttgtctataattcctctctttgcccataggtttgtcgttgccagagaaagattctcaccgatatccatctgagcaacgatcccttcattccttctgtcttccggtataaatgcaacaccagccttacatgcctccagtggattcctgggtgaaaacggcctgccgtctactttaattgtcccactctttatcttctgcgcaccatatacagccagcattgtctcagtacgtcccgctccgataagcccggcaagtccaagaatctctcctctgcgaagcttaaagctgaccccgtttacaagattaccggaatataggtcagaaatctccagcacaacgtcacctttttccgtttcttcctttggataaaaatcctttaattctttaccgatcattaagtttacaacgtctttatgctccagcgtatttgtcggaaatgttccctggactctgctgtcccttaatacagtgatactgtctgtgatcctgaaaatttcatccagatgatgagatatgtaaatgacagtaactccttcttctttcagctttccgattatctcaaacagtttttcgatctcccggttgcttagtgatgctgtcggttcatccagaatcaacagctttggatttttaagcaatgccgaaataatcgcaacttgctctctctgccctacgctcaaggttgatatctgcctgtctgatgtaaagtccgcttcgatcatggacagcttgtcatcaaccatggccttcattttcctgaagttaaggcttctcccctttccaattatctccgagcccaaaaatgcgtttcttgtcacatcaaagaacggaactaactgctggtcttgatggatgatcgcgatccctgctttttctgaatctttcggggaattcagtttcacctcttgaccgtcaacccatatctctcctgaattcatcgaatatacgccagttatgatctttacgagcgtagattttccagctccattttgcccaagcaatgcatgtacttcccctttttttacttgaaggcatatatcctgaagcactatatttttgccaaagcttttatatatgttcttacactctaacaatattttacttccagtcatcatatcaccaactttctcattatgcttgtctaaagtggaccgggcgggaccgcccccgcccggattcattatcttatgggatgctcggaagtgaaacgatgacatcttcttccttcgggaatgttttttctacatcttctttcacaagtcctgcatcttcccagaacttctccccccatttcatttctgccgcttctacgccattctttcttgtggccacataacaacttgctggaatcttaggagatatcgtctctgcatcaatactgccatccatgacaccaagtaatatgtctgctgactgctgcccaatactttctgtgtccataacgactgttgaaataaacgggctgtcttcctggaataacatctggaatccgagtacatctccgtcgattccgatcatcttgatctcttctcctcttcccgcacggcggattgcctcactcgcgccagatacgagctggtcataagttccaaatattcctgcaatgctgcctttttccggatttgcagtcagaatttcttcaatctgtgtctgaacctttgccggattatgttctgcaggaacttcgtgaatcttaacatccggataatcagccgccaccgcctcaaaaattcgttttctcgtctctaaaagcggtgctcccggcacccatacaacatacacatcacctttatatccaatgcttgcaagcaatgcatccgacgccaaagttgccataagtggatcatccccatttacatcccccagtgtatgctctaccggagatccaactccgtttgtgataactggaattccctttttttccgcttctgccatgagtggtgccatctgttccggatctccaagatgtacaattagtccgtcaattcctgaattgatcaaattctctatattttcattatgtttctgaacatcggcctgggcatcagctatcacgacactcccgcctgctttttcaatcaactcttgggaggctgatacaatattgcggttgtaatcatttgtaatttctcttgccgcaattccgatcttaaatttgccatcttttttactatccttgactgttccattggctgtgtcttttttagaactgtcctcagtctggtctttcaccgcgtctgtccccttctcatccacggagcagccggccagcgtaccgaccagcatagcggcggttataaataagacacaccattttttcatctttctcatgttctttcctccttgtaattttgatactttcattatacaatgatatacatattagtcaactaatcaataaacattttaataaacatctgctttattactaatttacagatttcatttttagacaaactgcacaacgatttaccttttattacatcttatgatataattcttctacaatcagcattctaagatttttatcagacaggaggtttacatgaatatacgacacacaacgcagtccattcggaaacaaaagttatggataaaaagacggaccccctttcagatctggatactgtcttttctcttattgggagctgtattttttttatttatcattgacccctcagaatccacaagagcaaagtctggaatgttaaacgcttctcatatagacaataaactacctgtcgcattaaacggagagtgggaatattacgacggacaattcttatttccatctgatttttcctcctcttcaaaggataggatcagggctgaataccgcacactgcccggcactctgcctgctaattatggttacggtacgtatcgcttaaactttacatttctaagcacagctgaactgtattccatacgcttgtccggggtgcagggaaccgcacgtgtctacgtggacggtcttcttatagctgacgtaggctttacatcctcattaaaagaaagttccgaatcttccaaggacaaccaatatatcgtatttcccctggatattatgcggcgttctcatgaaatcattattcaaacatcaaattttagtaattactgctttggaattacaagcccggtctattttggcacgcagatcgacggctaccgtctttcatcgcagtttaagtttgctgagtctgttggtctcatgagtgtcagtgtgctggctatattactcgtgtttatcctggtattccggatccaaatgggaaacatgctgtatcttcttttgtttaccattacactgctgtttcatctggtctactcaagtaatgacctgttgacccaacctgtgcagtcatggtcatatctccttttgacaagactatatatcatctgttttggattgatcggtttctttataacccggcttgcgggacataatgagaatgcatccggaattttgtacaaattgatgagactgcaccggcttctccttcctatgcttgtctgtatttctttagcatgcccaaataactgccttcctcttatgaaaatgctgcttggcatatattttctgctgtccattgtgcatgcctcgatcacgcttgccataagaatttatactaaaagctacagcgccctgatgcagatgctcgcattatgcttttgcggcagttattttttactgcagtatcttaacagccgggggatggtcacacctgtttcatatacgtacagctatatcttcctccttgtagcttatgtgacctcggagcttgcttatgtagcattgcaggtttcccgtatctatactggaaatgcaaggctcgcccaccgtatggttgttgcggacaaactgaaaagtgaatttatttctgctacatcccatgaactcagaaccccgcttcatggaatcattaatattatagaatctgcctgttcaaggcttgacgatcctgataccgccaaagacgaacttacgctcgcattgactcttacacgcaggatgaacagtgtcattcatgacttgtatggtttctattctacatcagaacgtctggatacaggacttagacccgtcaatctcgacatagaggtaaatgccgtgatcgaagtctttcactatacggtcaacaatgaccgtttaactttaaagaacagactttctcctgatgccttgtgggtaaatgcggatgaatccaggctctgggaagttcttaacaatatcattggaaattctgtaaagtacacagacgccggtacggtcaccatcacaagtagacgggaggataataagatctatctatctgttacagatactggtatcggcatgtccgcccgcgagatgagccggatatttgacaaatctgtacgtctggaggatgcagcaaagcggaccggcggcaccggttacggactttacctggccaggcagttggtcgagcagatgaatggtagcatttatgttgagtgggccaaacctgaaatcggcacttccatcacattctgtcttgatgcctgcgaccccaagaatgaatgcgcggaaactaccgccgctgatcagtccgatgagatttcagaaggccgtaattttctggagaattttcatggtgacaatgcatctatgcttgttgttgatgacaatttggataatttgaatattatccggactatttttgatgactgcagcttttccatagactgtgtgcaaaatgcctcggacgctttacggttgatggacaagcatacttatgatatcatcatattagacgtaatgatgccggatatgagcgggtttgagatgtgccagaccgtcagaaaacgatactcacatttcgaacttccggtacttctgcttactgcctgtgattcaaccgaagaaatcctgaccggattctggtcgggagcaaatgattatgtcgttaagccggcggaccgaatcgaactccgtacacgagtatttagcctcatcaccttacgccagtctgttaaagctgcattggagaatgaaatgctgtttctgcaggcacagatccgccctcattttctatacaacgcatttaatacgatcagcgcggtcgcacttacggatggtttgaaggcaagcagcctgatcgacgatctggctgcatatctgcgtggatgttttggaaaagatatggataacgacctcgtcacaatcgaaacggaacttggcattgtcaattcgtatgtccggatagaacaggctcgttttggaaaccggcttcacttcatacaagagatacagacagacaaaagtttctttctgcctcctctcaccgtacagccattggtagaaaatgcgatccgtcatgcgacacttggacattatggcgatatccaacttaagttgacggtcatgaaatgcggtgattctattcatattatcgtgaaggacaacggaaatggtatggaagcttccaagatctccagcttattaaatgcagaccagaatgataaaacaagcggtatcggacttaaaaatgtaaaccggcggctgaacctgcactacggcatccccctggagatacggacatccccagggaatggcacagaaatcctgataaggatcccgctagataaataattaaaactaatactaatttggatataatattgaggtgaacagatgaaatacagaacaataatcgtagatgatgagccgccggcactggcaaagctcagctatctattgaaagattatgaagagtttgagctagtaggcgcttttgacaattctgacgacgtggtaaactcgattgatgaattgaaaccccaggctgcatttttagatattgccatgccggggcgtaatggaatggaactggcatcgatcctgcagtcacagttatctgatactgtcaaaatcgtgttcgtcacagcgtatgaccagtatgctgtatcggctttcgatctaagcgccacagattacctgttgaaaccggttagtacagaccggtttaagcggtctgtagcccgattgaaagaagcgcttcagactcagccttccattaaagcttccgtcacgggaacagcagctgaaaagcccatggtgcacgcattcggaaaacttgagatcacaggcaccggaacacagaccccggaatggaggactgcgaaagtccgtgaactatttgctttgtatctccaaaacagaccaaatggtatttttagaaaaacactgcttgaaacactttggtgcggtctttcagaggataaagcattgtctaatttaaatacatgtaattattacttgcgtaattttctgaagaaaacagagacagacatctcattaaagtacaaaagcggttattattccctcgacttaggaagcacaacctgcgaccttgatctgtttgaacaggcagaaaagctgtccaagtcacctgcagaggataacatagaaactatattagatggagcgtccctataccgcggcaaatattttgaggatgtcaaatgcagctgggcaaaccttatccgcgaccagtatgatatccgatacgctatcctgcgcgtcaccctggcctcgtattacgctgcacacgatcagttaaccgaatccaatacccatgcggcaatggcactggatgtagatcccctctgccagaacgcgtggaaaatactgctcactaattataaaacggccgcagataagatacactataaaaataccctggataacatgcaggaaacatataaatccagaaatctcccagcacctatattctgatcaatacttcacataggcacatggtatatttcaatcagggacgccgctttgtttaataaaatatccctgcagattaaaagtaatcagatatataaggggtctgttgttcaatggcatcctccagcatatcaatgacggcttcactcgtctgcaatcttccgattttcgcgagataatccgggcgtttatagcccatgagcattgtcgtcattgtctgaatattgattttatccgggcactgcgcagagattcgagtggcctctccgtgcccgttttcagatatcctcaataaaaacgaaccttgattgcactccaggatcgggtcggtcattgtaaatctccattcgcgctccgtgatgtccggcttgaacggatattgcgctataaatgccggaaagtccacgatccttgccatataatagggcgaaataacttcttgaatactggcatcctccaacaaaaaggctaagggttcgtcggtataagtgtttccctcaactttgtcgatcattgaaaaatgtgctgatacaaagttccacaggcctgttctggcttcttcggtattgaagatcatgtccttgatatgaaaaacctcattttcgatccagtagatgatatacccgtccggctcctcgttctcgttatagtacacagccgacataatatcgtctttatcccaaagccaatactcgttccacgcaagatcatcccggataatagcgccgtgggtgtgcgctgcataccggtcatacgcggcctttaattcctcactgtccgttttgacgcgccggatctcccctgtaacctgctggtttttcggaagctgataatctttgatctcatagacgattttatctgagatcagttcccagcccttccgtcggtagtaagggatcgaatatggatacagataacagatatactgtccctttttctgcatgtttatcaacgcctgctgcagcagcttatgcatcagccccatatttgaatattccggataagtcccaacaccggtcagcccgcccatagaatatatcctgccaaaaacattgatctgcataggatagactgctacctgagaaactaatgtatctccgtcaaaccatccaatcacatctgctttttccatcgttgggaatttggcccgtatgatttccttttcctgccatccaactgaatttagttcctggtccgtcacttggaacacatatcgcagtaatgcattatattgttccagatatctgctgtcaaccgaccgcatttttaattttcttttgatcatagtctaacctcacttagatgattttcttttttccatccttttttatagcgaagaaacaggcctgccgtgagtatgagtgtaaggccttctgccagcgtcgggctccaccatatgccgcgtcctccgaaccaagcggtgaggactccaagactcagcacgagcatgacgatacttctcgccaccgatatgaccatggccgataccggcctctccactgccgtaaaatagccgccgatcacgatattgtatccggccacaagaaacgacagcacgaaaatgcacattacatgcacagagtaagcgctcagttccgtgagttcttttgctacgaacattcctacgatccctttcgccccgagaatacttccggctgtaaatgccacagacacgaccaccgcagccacaataccgtaacgcatcagcttccggcagcggtccatccgcttctggccgtagtagtagctgatgagcggctggtatccctgggcgattccgaccatggacatgatagcaatagaatttacatatgaaatgatcgtataacttacgagagcgtcttcgttcaggtagcgcagtatcgcctggttgaacaggaagatgatcagccctgtcgacaattctgtaatacccgagggaagcccatttttgaactctctccacacaagaggcagatccagcctgaacttcctgaatttgatggttcccttcccccccagaaaatgcatcagataaagtccgataagcgctgcgttggacagacccgtggcgagcgccgcgccgctgatccccatattccattccataaccatgaaatagtccagcactacattcatgagagaacctgtcgtcacgatgatcgtcgcgcgctttggataaccgtctgtcttgatcagcatctcaaaggaatatgccaggatgaacagtccggagaacggtacaagcgttccgagatagtccagcacatactctctgttctgggctgttgctccgaggaagtcggcaaaacgctccagattcagcatcacagccagcgtgatgatgaccgacagtacgatgagaagaacgatattctgcgtaaatacttcatttgcccgcccgatattcttctcaccgtgcaggatcgccacaacggtagatgtcccgatagcaaataagatcgatatcgcaaacagccccatgacatacggcatagatatgttaaccgccgtcagcgccacctcggacacccctcttgcaacaaatataccatctaccatcgtatatagcgcaaatacccactgagcaacgatagacggtatgataaatcttataaaatcacctttcagtgattttccttccaatctcataatgatctctccttcattcttataccttgtaattatacaataaaccttggtataatactaaggtcaagagttttattttgaagccacagcgcggaggtgttcttatgaagcattactaccggatcggtgagatctcacaattgtataatataggaccggattctctgcgctactatgaaaagctcggcatcttaaagccccacagaggagaaaacgattaccgcctgtaccacgtccacgacctgtggcgcctgaatgtcatccgcgatctaagagaacttggcttttccatggagcgcatccgggaatatctgaacgacagaagtctgtcaagcacagagaacatgctgcaggaggaactggacattatcaatgagcgcatgaagtctctggagacgctgaaatccaacatcgaggaccgcctcgatactatccgggacgcaatgaagcagccgatcggagttatcgaggaaaaagagcttccggtgcggcgctgccatacgatccacgcaggctacagccaggatgaggagatggatatgctcatcaaacagctgctcaacaaaaataaagataagctctatatcatcgggaacaaccgtatcggctccgtcatatctgccggcagcgccgcctcaggtgattaccggaactacagcgctgtatttattattgacaaaagcggagaagatatgatagaggcaggccggtatctctctgtaagctacagaggagactgcgcccaaaacgaggactatatcccccggctgctcgcgtacgctgaggaacacggctacgcgcttcaagggccgtttctggagctgctctggacggacatccaccaggccgccgaggaaaaagagcatatcacggaacttcagatcaaagtcggcagagcataagacgtcaggaaacgccggcagcatttttcgctgtccggcgtttctgcactgtcacctctttatatttctttgatccggctgatagcggccaccgtattttcatatgaaccaaatgcggtcagacggaagtatccctcaccgcttggaccaaaccccgagccgggcgttccgacgactccggcgtgttccagaagatggtcaaagaattgccacgacgtcatgcccttcggtgtctccagccatatatacggcgcattcacaccgcctgatacattgtacccggcgctttttaatccgtcatagatgatcccggcatttttcatatagtatgctacctgttctccaagctgtgtcctgcccgcctcggagtaaacggcctctccggctttctggacgatatacggcgccccgttatatttagtcccgtgccgccttgcccagagagcgtgcagcatgacgtccccgcatttcagatcctttgggaccacagcggcgccaagccttacgcctgtaaacccggcattttttgagaagcttctgagttctatggcgcatgtcctggctccgtcgcattcgtagatcgtatggggcacatcctcctcagagatatacgcctcgtatgccgcgtcatatatgagcacggctccgtttttattcgcatagtccacccattcctgaagctggggctttgtgatcgtggaaccggtcggattatttggaaagcaaagataaataatgtccggcgtctccttcggaagctcgggcgcaaaattcgtctcctttgtgcacggcatatatatgacatcactccacgtctctgtatccgcattgtatgtgccggtccgtcccgccatcacattcgtgtctacatataccgggtacaccgggtcgcagacggctatccggttatcctttgcaaagatctcctggatattgccggaatcacatttcgccccgtctgatataaatatctcgtcggctttgatatcacagcccctgtccttataatctttttcggccatggcagttctcaaaaattcatatcccagatcgggcgcgtacccgtgaaaagtctccgcatgcgccatctcctccaccgcgccgtgcagcgcatcgatgatggccggagccagcggctgtgtcacgtcaccaattccgagacgtatgacagactgctccgggtgctcctcctcgtatgccgccacttttttcccgatggccgaaaacagatagctgcccggcagcttcaggtaatcctcatttattttaaacatatgcattcctccttgtcctaatggtatcgttatatctgtatctccccgtcaaacacgacctctgcaggcccggtcatgtacactttgtccgcttccttgtcccactcgatcagcaggtctccgcccaaaagccttaccgtaactttatcttccgtaagaccgttcagtatacatgccacagccaccgcacaggcgccggtgccgcacgccagcgtttctcccgagccgcgctcccacacccgcatctctacagtctctctgtcgatcacgcgggcaaattcggtgttgacacgcttcggaaagcgttcgtggttctcaaactttggtccgaccgcttcaagctccagccctttcacatcatccacaaatatcacggcatgcggatttcccatggaaactccggtcatccggtatatggccccgtccacaacgataggttcactgatcaccgcatcaccgccggacacgataggaatacgttccggcttaagctccggccttcccatatctactttgataagtacggcttttccgtcttttaccgtcaggtccagatatttgactccgccgagcgtctctacagatatgttcgttttatccgtcagtccgtagtcatatacgtattttgccacacaacggatcccgttgccgcacatctctcccctggagccgtcggcattgtacatctccatctcaaagtcggccttttcggaaggacagatcataataagtccgtccgagccgaccccaaagtgccggtcgctcaaaattctggcagcctccggcggattaccgatcttttctttaaaacagtttacatagacataatcattccccagtccgtgcatttttgtaaatttcatattatccctctctttctacaaccgctacttggccataatactcagaaccatctctgccgtctccgccatattggtcccgctgtccatgctgtttttctgcagatatctgtgggcttcgccttccgacatattgttgcggtccatcagaagttctttcgctctgcgaatgacctcctgctgtttcgggttccgttcttttggctcctgcttcctttttcttctccttcggttcatgctctcaagcatcatttcaaccgtgttcagaagatcatataccttgagcggcatgttaagccccataacgccgtccgccagtccgctgctccacttgtcaggagaagctattaacagcatctcaaaattggacggaagatattcacgcagttcagaatacagcatatctttcagtttataaccgcacacgacaatgccctcatccaccgtgtcggcataattcatggcctgtgcacctgtcgtacataccccggtgacagtcatgcccccgcgggctaacaggttacgaatattggctgcattgtccttatttggaaatacaacaataataccaaccaaactgacacctcctgtactgttttttttactgatcacgacaggcaggcgtcagattctgtgcagatattgttcaatctcccaatctgtgacctgtcccctgtaagccttgtattcttctgtcttcgccctgacgaacttttcagcgaggtcttccccgagcacgccctttataaaatcgtctttttcaaattcacgtgccgcttcaagcaggcttcccggcagcgaatcgatccgggcttccttcctctgctcttctgtcatctcatatatattacagtcaatactctccggcggcaatatctcatttttgatcccgtccaggccggccgccaggcagactgccagcgccagatacggattagacgacggatccgggcttctgagctccaccctcacatctctgtcctttgacgccggtatgcgtatgagcggcgtgcggttcttggaagaccaggcgatatataccggcgcttcgtagccgggcacgagccttttgtaggagtttacgatgggattcgtgataaagctgattgccttcatatgcttcatgattccgccgataaaataatacgcttccctgctcagccccttttcatccttcgggtctgaaaatacgttgatgccgtctctgcaaagcgacatgttcaggtgcatgcccgaaccatgcgtgccgcattttggcttcggcataaacgtggcgtgtagaccgtgccgttttgcgatcgtttttacgacaagcttaaaagtcatgatgttatctgccgttgccagcgcttcgtcgtatttaaaatctatctcgtgctgcgccggagccatctcatgatgagacgcttctatctcaaagcccatatcctcaagcgtgagcaccatgtctctgcgggcattttctccaagatcaagaggacccagatcaaaatagcccgcacactcatgtgtgagcgtcgtcggcagtccgtcgtcatctgtgtgaaacagaaagaattcacattcaggtcccacgttgaattcatacccctccgtctctgcctccgccaggactttctttaatatatatctcgggtcacttttaaacaccgtgccgtccgccttgtacacatcgcagatcagccttgccacttttccctgctgcggcctccacggaaatatttcaaaggtgttcagatcaggataaagatacatgtctgaatcctcaactctggcaaaaccttcgatcgccgatccgtcaaacatgcagttattatccagcgccttttcaagctggcttaccgtgaccgcgacatttttcagggtgccgaaaatatcagtgaactgaaggcggataaatcccacatcttcgtcggcgaccttttttaatatgtcttctcttgtgtaattattcattgtctgctacctcccttaaacgtattttattatatcaaatactttatgactgtatatttatgcaatttactgtataaatgaaggcgttctcatcctgatgaaaacgcctttgttttatacaataataaattataaatagaaaacggcactttgtcaacgtgccaaagtgccgaatataatcccggatctgacttaatcttcgtcatcaagccagtaatcatcgtcgagctcattatatacattcccgttattattgccgcagctgatgccttttttgaccggtgacagcagaaatcctttcacgataccgataagcaggcagcataatatgagcagtaccttttccgccggtgaccagtctctcttaaaaaacccctttattgatttccagatatctttcatgattcttcctccttaaattatccatactccatgtggtaatgtccctgtccttattatatgcctttcaccgcaatttctcaagcaggtaatctgaaatatgtgaagattgaaaaaagtaagccgctttgctacaataaggatatattacatcgccggatgtaccgtgaaactataatagaaaggtgtggtgaattatgggaactgctgtaccgatcgagacgagtgcgcgccacatgcacatcagtgaatcagatttcaagatattatttggagaggatgcctccctgtcatacaaagctccgctgagccagcccggccaatacgtgtccggcgagcggctcacggtcaagggtccgaaaggaagctttgagaacatagcagtcctggggccttaccgccgtgaaacacaagtcgaactatccatgaccgatacgcgaaagctcggagtaccggccatgatccgccagtccggcgacacgaagggcacccccggatgtacgcttataggcccaaaagggacactggagatcgaccacggtgtgatcgtagccaaacggcatatccatatgactcctgttcaggccgcccagtttaatgtcaaggacaatgacgaagtatttgttatcatggagagctttgagcgctccctcatctttgcggacgtggtcgtccgcgtcagtccggattttgcgctcgccatgcatgtcgataccgatgaagcaaacgcctttgccaacgaaaacgatccgaccggagtcatcctgaagctcttcggaggcagaacctacaatctgcagaaatgggcggaagaactccagagcggcatccaccggctttaacggccgtcatgataaaatggaaaacagggcgttaggccgcttcatttacagctttgccgtcaatgtcttggcggtgacgccggactgcatgccaagctttcctgagagggcgcttgtcacatcgccgggcgcgtccaatacaacgcttataatggacacgcccctgtcgcggtacggtattcccatacgtccaacaatatattggcggaattcatgcagcagttcattgatcgctgtcactgattcctcttctttaatgattatgctgatcacagatactctgttatccatatgtctcttcctctctctgcctacggaagtacatcttccactatcttctgggcaaatgcttccagctcatctgccctgtcttcttttaacacggacttgatcgacagctgctcgagaactgtgatgtccttcagctcttccagctttttcgcgatcatccggcctgctgccggcgcccatgtgccattatccataagcgcgaccgtacgtttctgaacagaaagtgccttcatatcactcagcagattctctatcggaggatagatgccgccgttgtaagtcgcgcacgcaagcacgatatggctgcttcggaacatctccgagatcagttccgacacgtggacggcagatgcatcataaatcttgatcccctttatccctgcgtcggccatacggcacgcaagggaatttaccgccgcctcagtgtgcccgtatatggatccgtaaataatgacgaccgaattctcctccggctcatatttgctccatttatcatacttctctacaaagaattcaatattgcttctccaaaccggaccgtgcagagggcatatcatcttcacatcaagctccgccgcttttttcagcagattctgcacctgggctccatactttcctacgatatttgaataataccttctcgcatccgcgagccagtctctctcaaaatcgatctcatcattaaaaatatttccgtcaagcgcaccgaaggttccaaatgcgtcggctgaaaacagaatcttgtccttctcgtcatagctcaccattacctcaggccagtgcaccatcggagccattataaaacgcagtgtatgtgtccctgtggagagagtatcgccttctttgacgagcacgaccctgccgtcagacgcaacgtcaaaaaactgatgtatcatctgtacggtctttgtgttcgccaccacctgcatatccgggtatcttttcatcagttcctctatattggcacagtggtcgggctccatatgctgtacgaccagataatcaatagtgcggccgtcaagcacatactccagattttccataaactgacttgtggcggactcatccaccgtatccatcagcgtcaccttttcgtccatgatcagataggaattgtaggagactccccgcggtatgggaaataaattttcaaataaagcaagccgcctgtcattgcagccgacccatacgatgtcatctgttacttttcttgtaccctgcatttttcagcatcctcctgtcgtttttaatttatatgttttcaaattcagctttaaagagagatattcttttacttgaatatcagcactattataacacacacataaaatttgtaatgtaaaattttgtactgtctttgcatttttctttatacaatatgatattctttatcaaaaacaggcaaaacggctataatccggtgaaaagagccgccccgaacaggtagaccgcgctgtaataaagcagcagaatagccgccccgtaacaaaactgcgtctttcctcttgtagtccggtaagcaatgataccgtctgatatgacaaagcagacggcgcctgcggccgccatcccggacgccaccgttgtaaatgccgcaaaaagcgtgaccgccgaggctgccatataacagagcaccgccatatatatgactgccgcggttttcagacttccaagcgtcttcatatcatttttaaatataagaaacaggagcagatagacagcagccgctcccgcaactgtataccactcaggacgtgccagcctgttgaacgccgttataaagcatatgtgcgccagaccgaacagcaggatcccttttacaaagtccagttccagcgcgacatccgcggccatgcacaatacaagtccaaacgacacgagcgtaccggtcatccctccaaacctgatagctccgtacattccgagaaacactgccataaacgttgcaagcgctttaaatacaagcgaccggcatccgatcctttcccttaatgctccatatataattccaaatgccagcatgagaactgctgcgatgatcaataccctcatgtatccctcttctgctctccttattcctctcccgaacttacaagtatatattccgagtatagcacagcagttaagagtttaacaggggcttttcagtcttttatctgccggcctgtcacatccatatgatatccgtccttatagatgagctgagataccggcacgatctcataccccttcttctcaagaccggtgatgaggccgtccagcgcgtctgccgtatacttcgcgccattgtggcatagaatgacggatccgctgccaagctgctcattgtcgagcacagttgtaaggatactttccacaccatagtctttccagtccaggctgtctacattccactggatcgtataataaccacattctctggcggtcaggatcacggcgtcgtcatagtccccgtacggcgcccggaacagattcatatccactcctgtcagttccttcactttcttatgcactgacagaagttcctgctttttctcttcatcactcagctgagacatatttttatgattctcactgtggcttcccagatcatgtcctgcctcgtaaaccgccttcacatcatccggatacttttctacccagccgcctgtcataaaaaaggtcacatggacatcgtgcttttttaatatgccgagtatcttctgcgtatcctcgtttccccacgccgcatcaaatgtaagagccacttttttctcttttgtctccacggaatatatcggaagctcccgcccatttacattacttgataccttcacatacttcgacacatacttgaaggaaccggcaagcgcaactgccgccgcaagcgccagtaccacataactttttacccttttgactgtctcctgcttcataaggcaaaactccagaataaatacacttattctattgtatgcccgccatattcgtcctacatcataaaacggaaataattaactttatatttaccgggtcagccgatatggtaagaatgcagcgtgtgctccatgtaagtgaccgtccttttgacagcgtccttaacagtaagcgtccgcaccgtatctttcatcttcgccagcatgcccctgaagatgagaatgttcatctcgatgacggccatggcatcctccggcggtatatcgtaccctttttcctgtataatgcgttccaacgctatgtaatcgcgtttataaaagtctccttccatgagcatctcttcgtactctaccgcgctgtcagacctctccatcggaaaaatctcgtgatacatcttaaatacagcgggcagattcgccgcgccggcgggactaaagaaaagcacctggtaaatatcgggatggcagaacgaatgattgcaaaagcattcccagttgagcagatactgctctctcatatctttggcctgcttcagataggaaggcagttccgttgcatattcattcagacacttggcgcacgcaaacagcgtcagttcttcaagacttgaaaaataatgatacagtgtagcgctgttatagcctgccctctcagccaccttcctgatggaaagctcaccgattccatcctgttcgataatttcgatcgccgcgctgataaaatatgacataatccgttttcgtttcaattctctgtttcgcacatttatcgtcatacggaatccctgcctttctatatatgtttacttttacttatcaagctgctgatgtacaatcatgtataatcataatatcattctgaaattctaaaagcaaggtaattatcaaacacatctccaaaaactatacgccagttatattttaactgcatattaaaatataatcagtgattgacaaacttttgtttatatagtagtattataatacaaaaaaatagttctgctcaaaaaattatgcaaaagaacaaggcagaagaaagagaggttatttttggggacagaaaacaaacattataagaaagccataagcgtagaggctttcatttttttggggatttttttactgattttcggattcatggcatccaggatgggcggggtgaacatgatgaacacgctgatgaacaccgcctacaaactgctgctggacactgtattttacataatggctatcgccgtactggccggagcgatctcgggactcttctccgagttcggagtcatctccatgatcaacaaggctttatctccgctcatgaagcctttgtacaatcttcccggagccgccgcacttggcgtcatcacaacttatttatctgataacccggcaatattggggcttgccgaggacagaaacttcagaaaatacttccgtaagttccagctgcccgcccttacgaatctgggaacatctttcggaatgggtatgatcgtatctacgtttatgatcgggctgaacgtaaaaggcggacacgccggtctggcagtgatcgtcggcaacgtgggcgcagtgatcggaagcatcataagtgtcaggatcatgatgcagtttacgaaaaagacatacggcacggcggaatattgtattcctctggaaaaaggtgaaaacgcggaacagctgtttaaattccgggaggtacgggaaggcagcgccggcggcagggcgatcgaagcactgcttaccggaggcaagggcggcgtggacgtcggtctcgctatcattcccggcgtactcgctatctgtactctcgttatgatgctcactaacggtccttccgaatccggtgtctatacaggggctgcctatgagggcgtcgctcttctgccgtggatcggcgagaagatccagttcatcctgacaccgctgttcggctttacagacccttcggccatctctgttcccatcactgcgctcggagctgccggggccgctatcggccttgtgcccaacatggtggagactggggctgctgcggccaacgatatcgccgtcttcaccgcaatgtgcatgtgctggagcggttatctgagcacccacgtggccatgatgtcttcactcggcgcaaacaaacttaccggcaaagcgatcctcagccacacgatcggaggaatctgcgcaggcgttgcggccaactggctctttaagcttgctgtgctgatcctataagcctgatataatgaagaaccgccagaaccggcatctgccggcactggcggttcttcattatggactttttacagcccctttttacataattgtcggatgagaccgaaaaaccgttatccttctatcgcaatatatttgtcttcttcaaccttcggctgactctcctccttcggtacaagaagtgtcagcgtcccgtcctcaaattttgctttgatgtcttcttcgcggactgcctccccgacataaaagcttctgctgcatgatccgctcatgcgttccctgcggatatacctgcctttctcgtccttctcatcattgcttctgtctgtggcagcgcttatggtaagataaccgtccttcagcgaggcctttacatcttcctttttgaatccgggaagatccatcgtcagctcatattttccgtcagcctcttttacatctgtccgcatcatgctgtcagaagcgatcctcttcatcggaaaatcccagaaatcatcaaaaactctttctccaaaaattctcggcatcaacataggtcatctctcctttttatgataattgttttatttgttctatatgtaatataacacttgttttttaatatgtcaacgtttttctgcaatttatgaagaaatttttatacatgagctaactttattgacacgatgtaagataagatatataatctatatgactaaattatattatttggtcatataacaaggagggatgataatgccaaagttcagcgaaactgaaaaagaaataataaagaaaaaaatgctgcaggaaggtgaaagattatttacatcattcggtataaagaaagtatctatcgatgagatcgtacatgctagtggaatagctaaaggttctttctactcattctatccgaacaaagaatccctttacatggatatcgctggaaatcttcaaaaaaagatgtggtcggaactggaagggtttttaaataaaaatagttctctgcctcccagaatactctgcaagaagtgttttctttgtatgtttaacggattacaaaaatatcccatgctgaaacgagctgacagtgaaacagcagaatatttatttcgcaagttaccacgcgaagtaatggaagctcattcaaaagatgatcgtcttgaaataattaaattgcaggaatatggtatccactttaactgcagtattgatattgcggcaaaaatattacagacattggcaattagttttctaaatctgcaaaatgatgatactgatgatcaacaggttattatggaggttatcctggatggtgtattaaaagaaattgtctgtgaagaacgcaatgccagtcaaacggaggtactttaatgaaaaataacgaacctgagactatatcattaccaaagtcattttgtatatttatgatcgcaggaatacaattttatgttgttattaaaattattgtcccctggttatcccgttgtttaaatacaacagaatatatagtatggatgtttgcaggaacatttttactttttatcccgatattttcttccgcacttctattattgaaaaaggatggatatgcgatggatcataagacaattaaaagagcacttaatttacataaattaagcaaaaaagactgtctatggattataacaggtttaataattgcaggattattatgttgtatcattattcttttatttatgggtttctcgaactcttttacagtagaaagtctatatagtatctctcccattgccgtgtcacctttgcatggaaatgaattatggtatgcaatttttcttcctgtgttctttttcttcaattatgcaggggaagaaatactatggcggggatacattttaccacgacagttaaattctaattatgggaagtatgccatactcataaatgctttgtttcattgcgtttaccattttgtttttggaataaagccattgattataatgtttcccatgctcatacttatgccccttatcgtttcaaagactaagaatacttggacatcaattattatacatactttaataggagcaccgacccaggtcatgattattttaggggtgcttggaaattaaatatcagcattttatcataaaaagacaggtaccgcatccggatattgacgctctccggtcatcggcacctgccttatcggcggcagagtctttctctgcctcctattatttggaattgatatttaaaataaacaacgtggacagcacaagcacaaaacctgctacatctatcatgcggaaggtcgttccgaggaagaccgcggccagcaccgtcgccgccacaggctccacgctggagagcagccctgcgtatacagaaccgacacttttcagcgaagacaggtaaaagcagaacgggaatatcgttcccaatatgacaatagacaaaaatgctgccactaccgccccgtcaatatgtacgtaaagcctccatggcctcgtcactgccgtcagcacaagtccgccgatgatcatggcccaggcacataccatttctgccgggtatttcttcagcagcggtccgggaagcacaccgtagaaacaagtagtcagcgccaccagcagcccgagcagaatacctttcggcgacacggacagggcatggatattcccgtgggtcaccacaagaaaaatacctgccagagagcacagtacagccgtgatctcttttgctttcggcatcaccttatagatcaccgcaaaatatatgatgagcatagccggattcaaatactggaatatagtggccgtccccgcatttgtctcctgcaccgccgcaaaaaatgtatactgcatccccatcataccaagtatggaaaagacgatctggcggacgccgtcgcttctctccttccataccacaggactctgcttcttaaaaagtacggcatacagaaacagaaggacccctgccatgacaaggcggtacggcacgagccattccgacgtcactcccttgtcctcaaacagaaactgcgctatagggcttgaagcgccccaaagaagtcccgccataaaggctgcaaaaaatccttttttcctctgtacatcctgctcttttttatcgtctgctgttgttataacttccccactcatcttctttcattcccaattatttattagtcgttggcattgagccattccttcatcaattctacatatctgtcattgtcctcaacaaagcacatatggcggcagaactggaacagctcccatctggaattcgggatcctgtcatacatatacttcgcaatgtacggcgtacacagatcatttcctccattgatgacaagcgccggctctttgatatctttcagctgctctgtcacatcgtaatccttaagcgttcccatcggtgtaaattcatttggtccccagccaatcacataagcttctccgcctttctgtacgggacgtctcagacattccggagaatcgtccgtcacggcgcctgctgcatggcgcagcatgtattcattttcagccgcggcatagaccgggtcgctgtagtctccggatgaagtcgctttctcgatcgcatcctgcatctcctgcggaagctccttgatcatgcggtgctgctctactccccacatccaggacgccggaagtgtacttgacagtatgagacttttaagtccggacggtttgtggttgcacacgtaatcaagaagaagcatgcctccccatgactggccgagcaaatgtatctcatcaagtcccaggtgttctctgagcgcggcaagttcttcgatccacgtctcggccgtccacagatccgggcggttttcgacgtaggactcgccgcatccaatctggtcatacatcacaagctctcgtccgtcttcctctgccagccggtccagcacctcaaaatagttatgcgtagaacccggtcctccatgaagcagaaccaatggtttcttactgccagtcttctttcctgtgatccggtaatacgtcttgtactccttaaatggcatatagccttctctgatttccatctctagaaaaacctccttgccgcttactgcggataatattgtcatcccgcacacccctatgcggataactgcataataattatatcgaactcccgggccaatgtacagaggttattgtacaaaccaggaattctttccccggtccttggccttatacatggcttcgtccgcacgtttcagacagtctttaaacgtacttccctccccgcatcttacgattcccacgctgcacgtaaaatgcaggtccggcgcctcatcaagcgtgatcgcggccaccttatgaacgacatcggccgcccgtccgtcgatgacatcccgggtcattcttccgggcacaaacgcgaaaaactcgtctcccccgtaccgtccaattatatcctttgctctgaaacatgtcttcagaacttccccgaccttacgtatactttcatccccggccagatgtccgtatttgtcattgatatctttaaagttatccaggtcgatcaaaaacaggcagccgccctgactctgctgtatatactcctgcacctgttccttgaacgcccctctgttgagcagtccggacaggttatcccgctctgccttgcgcacaagcgccatctcttttttcttttcaccagagatatccgtgactttgatgacaagacgcctctctctttttgctccgatcgttataatatccagtctgcaccatatatacgtcccgtcttttgtcttaagccttacttcatactgggcggtttccccttcctttggatgccccgccagtatcttatccagcacctgatgatcaccggaataaacaagacctgaatcaaaaatatattttttaaattccgtgatcactgtctgttctaccgccagcagcctcgaaatattggacgtacatttgagcgtgtcccgcctgcggtcatactcgcacagtatcgtgtcgctgaaattggccagaagcgccgtccgcttgcgctcaaaccggtgctccttattactgtggtagacaatgccggcaacgagaagaaggatcaccgccgccagcccgataagcagcgccgtcatcttttttccgttgtcttcaagcgtcactacatactcgttcatatctgccgagtaaaacacattcaggatgatccagccattgtatggaagaaagctgtaagatacatataccggctctttccctttcatgaatatcatgactttctgcttcttctctttaatattttctttcagttctctgacctgatccggactgccgcctatgttctccaggctgtcatacatattgacatatggcccccgctcttctgacagattttccgtaaacgcatttgtgccgtcctcgtacatgagaaagctttccgtatctgtccgcatgaatccggtctggctggaatacagcagcgtatcgctgctgatcagccctctgataaagccttccgccttcccgtccacaaatatcggctccgcaattccgtagtaaagtgcagttccattctcgttttcagaaggaaagatatctgagacaacagattccccttttttcagctgctctatcattttcaggtcattctcagacatgaccgatgtgtctatgctgtcgaaccggtaataccgcactccctctgcctgaatatcctcatttttgctcaccgcgttaaaataatctttcaggtcctgcgtccccccgcctgactcttcccgctgctgtaccatctcagctattgtttttaatgtagtcctcacattttctacccgtgcagtgacttccgtattctggctgtcagagtacgcttttatgttctgcgccgccagtttgtcaaacgcctggttcgtccatgactgatatctctggaagatgaccgttacgcccgcgcagcaaagcacggcacagattatactgactacgatgttcctttttttcatgaaaacacttccccgggttcccgtacaggcgaaccatttttttcattatacacttcttcgtccctgtcttgcaaatacactttccgccagaatgcacacgagtatcaccgccgctcctatatatcccctcaccgtcagcagttcccccaggatgagaaacgaaaagactgccgtggcaaccggctgtgacgtctgcagcattgacactgtctgggaggatatctttgccaccgccgtgttctggagcagataggcaatacaggtacacccgatggcaagataggctacaacgccccacgcggccggcgtcacactgtccacatgcagttcttccagaccggccgcaagagcgaggctgataactgccgtaagaccggcctgggccgcggataccgtacaggcgctcatacccgccagcgatttctcgccatacacgagcgcccccgccactgcagccgcggtgatcagagcgaacgcctctcctttcccgaagacaaatccctcctccccgcagcagagcaggtacagcccggccaccacggccgcctgtaccgggatatgcttccactcatactttgtcttcagaacaactcttgcaagtacaggcgcaaggaccaccgggagagacatcaaaaaccccacgttagtagctgttgtccacttgagcgccagattgacggatatgtatgccgccgccatacagagactggccggcaggcagtccatgatccttgcgctttttaactcccgtatgatcttctttccaaagaacagcatgagcacaaaaaaggccagcgaaaaacgcagagcaaggcaccagtacacggagatgctctcaaacgcgatcttcgttaccgggtttccgatgccgtataatacactctgcaaaaaaataaacatgatataaaccgatttgttctctttcatcattccccccgcttgccgacaacagtttattatccacattataatacagcaaacgtatgaatacaaatgggaagaacaaatcgttgctgcagaaggagccgggatcagacaagattgtctgatcccggctccttcccgatcactccgcaaaccttacgcggtcaataagactctgtttcttaaaactattgttcaccatatacgttataaggatctgtaccacgagtatgatggcggccagaacaactaccggaacaaccgggtactcataagttctgatggacattatgctttctgccctggcccagagaaagcagccgtatccggcgatgcttccggctccgacagacagaaggagtgttcccgctgtgtaaaacagtccttccagctgcagcatacgcaccgtctgctttcccgacaggccgaccgcctggaggactccgagctcgcgtcgtcttatatagacgctgttgatcatcgtattgacaagattcagtataccgatcagaccgaacacgaacatgaggccataacagccgtaaagcatgaagccgatacttttctctgactgcgcgtatgcgtccttccacgtatccatctgaaggaactcctggccgtctgtgagttgtttcactgcttctgccacgctgccggctttccccttttccgtgaaaatgtaaaagtcgtctgtcacatcattttcacatatgtcctccagcacggaagacggaaggataaatccgtttcccgtaaggccgtatggggcatctgtgacagctacgattttaaattcccttttgaccacttcgtctccgtcctctatgagcagatgcactttatcccctgttttccagtcagctccgggatatgatttcacatatccgccgctcagtattatgccggtgccgtccttcagactgtcatccgcaagggagccttctgtcacatatctgtccagctccttcatcgcctcctcgctcagaccgccgagacctgtttcaagaggtcttccgtcatcttccctgagttcctccagggcagcgctgacgcccgtatatgtctctatccgatctactccgtctatagatactatctgctctttcaattcctctgtcagcggattatttttctggatattgctgagctctctctccgggtgcatcttattgccgctttcactgttgagtgttatatgaatgtctccccgcgtcgtatccatggccattgttttcgggttcatacaactcagtatcgtggccacgactacgaaaaggattccggtgatcccaagcgtgacgatcgtcacgacggtacgtcttttgtttctccccaggttggacgcggtgagtctgcggatattcatctcttcatatcctcttcgctgctttttctttttctccttgtctgtcccctggaagcggatggcctcgatggcggatattttagcggccttctgcatgggacgcagcagggagatatatacggacacgcaagagacagccgccgccaggagaaggatccatggcttgacgagcgagacgccgccgtctgctatgatcttcttcatctcttctgccattagattatctgaggcaaggtctgaacttaccattccgttcacaagcagtattcccacaccaaggccgagcatcagtccgacagggaccgccgctgccgccactgtgaatccttcccggaatacaagctgtcttatctgtcgttttgtggagcctattgcttttagtttgccgtactcctgcactttgttcatcatggacacatagtatatgctgtaaatggtaaggatccccgcaaggacgatgatcaccatcagtatgaccatgcctgcgtacatggccgggtcaacgtaattggcaaacagatattccccgttttctacaatgtccgtttcaccgatattgtagctctttcctatctcttttatattgtcttttatggcatcggtcgtctttccctttgcgccggcaacggagaagtaaactctgtaccggtgttctcctgccgggatgatctcttctgcaaatttatctgagataagagcggaatatatgtttttttccactgcttcctctgagtcttctgtcatccccgttatcgtaaattccttttcggctgcctggccgagtccgtctgccatgaccggctggtacggaactgtgatcttgtctccgatccctccttttagacccatcactttcaaaagtccttcggacacgacgatctcatctgccctcctgggcagctctccttctttgagcttcagtctgttcagtttcaccgtattcctgtcacagtagaccatggaaatgcttgcgtcggtgtcatcgcataccatgtatgcggcgtcttctctcagacctgtatcggtcatccgggcgtcaccggtcatcttctgcgccgccttttcatctacatctcggaacatcccgtgaaaagtcggatacaggttatctactgccgtgaaccgaaggtcaactgagccgaacacaacggtcgggacaatggtgagcagcatggcggtcagcgcgatcgccgcgccgatcaatatatttctgctccggtttttcttaaagttggcaaatgctgtcttcgttataatgttcatctacttcaccaccctgccgtcagcgatgatgatcacccggtcggccatctgggcgatcgtctcatcatgcgttatcataacgagtgtctgtccgtatttatttacacagtttttcatcatcgatataacttccatctccgtcctggaatccaggttgccggtcggctcatccgccaggataatggccggttttgacgccagtgcgcgcgcaatggcaacccgctgtttctgccctccggacagtgtgtttggaagtgaatggagcttctgctccatcccgatgcttttgacaatgtccatcacgaattcctgatttaccttcttgccgtcaagaccgataggaagcacgatattctcccacacattcagagccggcatcagattgtagtcctggaatataaatccgatcttccgccttctgaacacggcaagctgttcgtccttcagcgcaaagatatcccttccttcaatatatactttgccggaatccggacggtccaggcctccaagcatatgaaggagtgtacttttcccggatcctgaccgtcctactatagcggtgaactctccgccctgtacgctcagatcggtatggtcgatcgccctgaccacattctctccctctccgtaatattttaccagatcttctgtctctaatatcgctctcataatagaacttcctcctgtctttttgtcagccccggcgtatgccggtacttactgctctgtaaatatcataatacaggagtcttacgggaacctttcaggaaacataacagttttgttattcttgaacgtatgacttcttcggcagtgtcatctggaacactgtcccgccggctttccccgcgacagctcttatgcttcctccctgctcttccagaatctgtctgacaagatataatccgacgccggctccctcacaggcttcgatctccggcctgctgccgcggtagaatcttctgaagatattctgatactcttcctttgcgatcccgatcccttcatcttctatctctacaaacacgtatgatatctggggggacaccctgatatgtaccgtggtgccttccggtgaatatttgaccgcattgtccagcacattcgcaaaggcctctgccgtccattttttatcgtggggaagcatcatatctttaaagtcttccatctctatctctatttttttcatgttcgccttgagatatacaccgttcaccgcacgcacaagtgtttctttgaggcttgcctccccgggatgtatctgtatcattcccgcttccattcttgaaagatttgtcagcgtctcggtcagatactttagcttctttatctcccctgcccccctggccacgaactctgcgcgctccgcgtctgttatccgggcgtcttccatcagctcaaaacacatggaaagcgccgccaccggcgtcttcagctgatgagagatatccgtaacgagcgtctttgtattttctttctcttcaatgaggccggactttaatgtgccgaacgcattgcccatccgctccagctgctctgtgatctgggagcggatccctgtccgcatatattctgtctccgtccggtattcataatttccctcttcaaactgctccagataatcggcgatatggacgtagttgcggtattcttttctgtatcttacgtactgccatattccgtctgccgaaagcgcggcgagtagaaactgccaaaagaaccggaagccgggatcacaaatgtacaacacggcaaaaaacgtcaggatcatcccggcgcttatgagcaggctgagacgaagttctttctcaagccagatatatcccctctccctgcgctccattactttctcaatacgtctgtcgtccataaatatccgattccccttatattttttatatattccgtttcactgtccccgccgagctttttcttaagcctgcttatattcacaggtaccgtattatcatccacaaactggccgtccacgtcccagacagcctccaggatctgttcctttgagatgatctgtctgggatgttccataaaatatgccagcagctgcatctctttcttactgagcggtgtttcctctccctttataaataccttcatttccctgcagtccagagtaaggttcggcgccgtcagcacggtcccttctccgccggtatgttctcttcttcgcataaatgcgtttacctttgatataaggaccataaggctgaacggcttcgtgatataatcgtccgcgcctgtatcatagccatttacaatgtctacttcctggtcgagcgcagtaagaaagagaatgaaaacatcgctgactctgcgtatttccctgcagaaatcaagtccgtttccatcctccagtgtaatgtcgctgatgataaggtctgtcttgttctcatcaaacagcctgcgcgcctccccggaaccggaagcgcacagcacatcatatccttctttctcaagcttcaggctgatgcccctgcgcaggctttcatcatcctccagcaatagtattgtacccatacaaaacactccttcatttatgcagaagccttccccgcagctaaaacgtcagctccatcttcgttcctttccccggctcactctccacgcggatgtccgctccatgtatcatcgcgccgtgctttacgatagacaggccgaggccggtgccgccgctctcctttgagtggcttttgtcgacccggtaaaaccgttcaaaaatacgctcctgctcctccttcggaatgccgatcccggtgtccgtcacgataaccttccggcctttcagtgtgcttcccacccagacggatacagagccgcccttccggttgtattttacagcattttcacagatgttgtagaccatctcatccagtatctgccggatcccccggtacacgaccggttcccctgtaacttctatatgaacatttcgcgaggatgcctgcggggagagcctgctgcagatctccctcgtgagctcatacagatcgacgtcttccttttccatctccaccttgccttcatcgagcctggagagcttgatgatatcctccacaagtgtgatgaggcggcttgcctcattatatatccgttcggaaaaaaccacaatatcttccggcttcaccagaccatttttcatgatctccgcatatccggatatggacgtcagcggtgtcttcagctcatgggatacattggcggaaaactcttttctcatattcgcaacggcatctttttctttgttctgtctgtcaatactttccagcaacggtctcagctcctcatacacttcattttcaagcggatgctccagattcagctcatttacggggcggatcagcctggatacctgccatttggagagcatccacgcgacgaacagcatgacggccgcaagtcctcccatgatgggcagcacctgtacagccatgtaaaatgcattgtctattgtcttagatactctgaggactgtcccgtccggcagacgcagcgcataataaaacatttctttgccgagtgtatccgaccggcggatatcctggccgcttccattgctcagcgcctcttttacttccggtctgttcttatgattcttaagcgtgtagtcatcttccctggaatcgtacaggacgtccccgctgtcgtctatgagtgtcacgcgggtgttctctctgactgcgtccatctcttccagatatgcggtgccggctgttttgaccgccgcccggatatagtctgcctcctgtcttgtctcatcctcgagcagatctactgtctggcggtacacgaccgcggtcatcgccgcgtaggatatgagcagtgtggtaaatatgacaagaatcatgctcttctgtattcgtgttctcatacaacggtctcctattcacacattttgtagcctacgccccgcacagtctctattttttctccgcacgcgcccagtttctgacgcagtgtcctcacatgcacatccacggtccgggtctctccgtcaaaatcatagccccatatatcctccaggagctggtctctcgtcagcacaatattcgggttgcgcatgagccgcttcagaagttcatattctttcagggtaaggtttactgtgctgccggaggcccgcacttcatgcttcctgatatctatctcgatattgccgagcgcgatcttatcttcccgcttatagtcgtctttcgccgtccttctgagtaccgccttgactcttgacacaagttccatcattccgaacggctttgtgacataatcgtccgcgccggagtcaagtcccatcactttgtcgtattccgctcctttggcagtcaccatgatcaccggtatctctctcgtcttgacggaagatttcagcctcttcaaaagctccatcccatcttcgcccggcagcatgatatcaagcagaataagctccggcgtctcaagcgccagagcctccagaaactctcttccgtcttcaaatccccgcgctttcatgcctgtactttccagcgtatatactaccagctcacggatgttgctgtcatcttctacacaaaatatcatcttgacactccttctggtctcttatatcttgctttctttgtggattcctgtaatggaaaattccacccattccgcgatatttgtggcatggtccgcgatccgctccagatactttgccaccataataaggtcaattgctttctttcccttgtctcctttattttcggcgataaagtcgatcaactcctgcttgttttccacaaacatcatatctaccgcatcgtcagcttccactaccttgcgcgacagttccagatcttttctgacatatgccgatacactgtccctcaccattttggccgcagcttcagacatctggccgatctttggtatctccgtggcctccgacattttctcggatatgatgatctccgctatgtcagacgcctggtcaccgatccgttccatatccgtgatcatcttaagcgccgcggagatctgtcttagatccttcgcaacgggctgctgctggagcagcagtttcagacagagacgttcaatgtccttttccatctggtcgatctcctcatccgcacggatgacgtcccgcgcttttgagacgcttccttcctgaagcgctgccgttgccctgttgatcgctatctcacacaattctcccatatgggtcagctgttcttttaacaagtcaagctgcatgtcaaatttgttacgcattctatccgaacctccctgtaatatagtcttctgtgcgtttatcggacggtatggagaacaatttctccgtatcgttgtactcgatcacctcgccgagcaggaaaaacgcggtattgtcagatacacggacagcctgctgcatattgtgcgttaccatgacaatagtataatcttttttcagttccgtcgcaaggtcttcgatcttggatgtggagatcggatcaagcgccgatgtcggctcatccatgagaagcacttccggctgcaccgccagcgcccgcgcgatgcacagacgctgctgctgcccgcccgacatgccgagcgcgctttttttcagtctgtccttacattcatcccagatagccgcgtcccacagtgacttttccacaatatcatccagttttgacttcgagcggatcccatgggtcctcggcccgaaggcgatgttgtcgtatatgctcatcggaaacggattcggcttttgaaataccattcccacacgctttctgagaagattcacatccatatccttaaagacattctgcccgtccagaaggatatctccttcgatcctgcagccctccaccagatcattcatcctgttgatagatttaagaagtgtggatttgccgcagccggacggaccgataaatgcagtgatcttattcttttcgatctccaggttcacattcttgagcgcatggaaatcatcgtagaataactccagattcttaatacttaattttcccatttttatatacaattcctttctatttcaaagggggtcagacccctctgcacgcaggggtctgacccctttcaaaatttacgcttttgtcagtctttttgccactatgcctgataatgtattgatgcctaccacgagcacgagcagtatcactgccgtcgcgtatgcctggttcatatacagtccttcactcgccagattatacatgtggaccgccagtgtcctccctgatcccatcacacttgacggaacatctgccacggaccctgctgtatagatgagcgccgcagtctctccgacgatgcggcccactgcaaggataacgcccgccagtatcccgggaaccgcggaaggcagaacgatgcggaacacagtccgcagttttcctgccccgaggccgaagcttccttcccggtaagaatcggggacggatttaagcgcctcttccgtcgtgcgcatgatgagcggaagtatcatgatcgccagcgtaaatgccccggcaagcagggagaatccccatccgcacgtagtcacaaaaaagagcattccgaacagtccgtagacgatggacggtattccggacaatgtctctgttgtcagtctgatcatctctacaaaccggtttcccctgcctgcatattccacgagaaatatggcggagaagatcccaaacgggactgcgatgagcagagacagcagtgtcattacgactgtattgataagcgccggcatcagcgatgcgttttccgacgtatatgtaaatgaaaacagcgacggtgtgatatacggcacgccccggatcaatatataggcgatcagaaatatgagcactgtaaatgtcagtatggccgaaagcatgacgagcagcataacgaggaaagaacccggccttcttctgtatgcccccagcttctgcttaagtgttgtctggttactactcatgacttcccctcctgttcagtaaagcgacgcagaaattgataagcaggataaacacgaacaataccacgcctgtcgcgatgagcgattcccggtgaaggtccgcggcgtatcccatctcgagcacgatgttggccgtcagcgtccggatcccgcggaagatcccggacggcattctcgcctggttgccggctaccatgatgaccgccattgtctccccgatcgcacgtccgacgccgaggacgacacctgccaccacgccggatctggctgccggcaggataacccggaaaatggcccgctcatgtgtggcgccaagggccaccgctccctcataataatggtcggggacggcccgtatcgccgactctgtcactccgatgatcgtagggagtatcatcatgccaagcaggagtgatgcggtcagaatactgtttccatttccgcttgaagagatcagtcccatactcttcagcgttcttccaaattcccgtatccacggtacaaggactaccaggccgaagaacccgtacacaacagacgggatcccagccagaagttccgttgcggacttgagaggcttgtagatctttttcggacagtattttgccatgaatacagaggtcagtatcccgatcggaacaccaaataaaattgctccggcagtgacatacagacttccgattatcattggaaatatgccgtatatattatttttggggcgccacatctcgcctgacagaaatttaaagaatccgatctccttcattgcagggactccatttgcaaacaggaaaatacaaatgagagctaccgccagcactgatgcgcaggcggcaatgaagaacactccccgcatgaaattttctttccatgcctttgatttcatttattcgattacctcatcccatgtaagagcttcgcctgtgtagattgatttcacctgatcgctgctcagctcatctactgtactgttgttgtttacgatcactgcgataccgtccgttgcgataacctgggcattgaggcctttagagatctccgtatctttcagttccctggatgccataccgatgtcatagcttccgtcaaccgctgatgtcatgcccgtggtggagtctgtcgtctgaagctcgatctcagcgtttgcattgactgccgtatatgcttcgatcaatttctccatgactggtgatacagaggaggagccgcctgctactgcctttccgctcggagatgtaccttcaaacggcttaacgtcgtccaatgcaatatatccgttctcttccacaactttctgtccttcttcgcttaaaataaagttgatgaaatcggatgccacttcattgtccagcccttcctttgtagcgatgttaaatggtctggaaactttatagtcgccgctctttacattttctgccgtcgcctctgcgccgtcgatcttgagtgctttgacgctgtcgtcaagagagccgagtgatacatagccgatcgcgtactcgtctccggacactgttgtaagcataacggatgtactgtttgttatctgggcttcttctgtcgtcatatccactttttcaccgtctttttcttcttcgatcccgaaaagctcaatgaaagctccccgcgttcccgaaccgtcttctcttgacacgatcgtgatatcgctggcggaatcccagtctgaggaagcctctgtctcatttcccgaatctttatttgagtctgctttttcatcactgctgccgcatcctgccgcaagccctgcgatcattccgacaactgccaatactgcaataaactttttcattttcataatctcaatctcctttaactacttctaaaatgatttgctgctatgttttcttcacaagtgcaatcataaaggagcaatgtaaaatctgaaatcagttcaatgttaaatctatgtaaaatcaccgagatcccattttttcatggcttgagaggagaatccgcttgacaaaacgacatgggtgtcgcataatatgacaaaaagcgtcatcagtgtcgcaaaggaggtatgcagaccttgagtataaagggagataagacaaaaatgtatatttgttccgaggcatataagctgtttgccgaaaaaggatttaaagaagtaacgatgcaggacatctgccgtaaaacagatctcagccgcggaggactttaccggcattatgaaaataccgcccagattttttccgctgtcatttccggcatgatggcagaacaggaggatgaattttctgaaaagatccacggcagtatgccggccgcccagattcttgatgatgtgctgaaccgttatgaagaggagatgctagacagcggtaattccctcagtgttgcaatatatgaatatttcagcagccccggtatctctcagaatgatgattctattctgcagcagtatctgtattctaagaaaatgtggacggaactgctcacatatggtatgcgcaccggagaattcaaaattgtggatccggcggcagtctttgacctaatcgtattttcctatcagggggttcggatgtacagcagattaatgcctgttcacagagacatcccccgcgggatcacaggccagatcagaaatctattattatcagaaagtgagatacgttaatgaaaacagtattttatgaaagcagaacatccgctcccgctttgtttgatccttcggataccacgagacaagccgagaatttccccgaggtatgtatctccactttttccaggcagatcatagacagattcgcggctttagatcatgtaaaagtcattgcggacctgtacaccgccaacgggatcaaccctgtatacaagctgtcgtacggcggcagggagatcgcattttacctttctttagtcggggcgccggcggccgtatgcgggctggaggaagtgatcgctctcggcggacggaaattcgtattctttggctcctgtggtattctcgatgatgaaaaggtaaatggcaggcttatcgttccgtctgcagctgtgagggaggaaggaacgagctaccactatcttgccccggccgcggaaattgagccggccgcagaggaaacgaaacttctgaaaaactgtctggaaaactgcggttatccatatgtatccggtaaaatatggacatctgatgccatttaccgggagacaacagatgccatacaatatttccgtgagattggctgtctcggcgttgatatggaatattcggcgctgctcgccgctgccgcatacaggaatgtgccattcatccagttcttttacggcgcggacagcctcgccggcgggaaatggcagccccgggatctgaccgattacggcctgagtaattcggaaaagtatatggcgcttgctctggaatgcggactggcgatgtgacaggaaaagcggcagattcctttttttgaatctgccgcttttcctgccgcccctatatcatcatacccatcacatatagatcataatactttccgtccagcaaggtggcattgcgcctgcacccttccacgataaacccgaacttcatatacagctcaactgcctttacattatcggcgcgggtatccaggctgatccttctcgtaatgccgtttcccttcgcccattctataagctgccggatcaattccgtacctacgccctgcccctgatacttttttgctactacgatcccaagttccccgtcatggcgggctttgatcttgtgcgaggaactgatcgtcgcgattcccacgatctcctctccatccatggccagaagcataatatttgtcatattgtcctcaaggccgcgtatagactctgcctgcgctctcacgtccatcggatactcgtctttttcaaaactcaaataactcgtctcgcctccaacataattgtagaacgcaacaatcttttccgcatcactttccattgctcttcgataagtaatcttctccataattatctcctttcacatctgtttcttgacattgcctgttttgcggcgaataacccggcagcgcttttatccgtctcctccgcagtttccttctctttatcctcacctgatctgatgaggacgataagcagcacgagcaggcctgtatacaggatagaatataacttgaatccgtataaaatcatgacggcggcctcaaaaacggcggcggtaactgccgcatacactgtaaaagaactcctccacacctctctgacactttttataccataaacgccggtcaccaggcctacggcccctttcagaaaataaaacagataccggagaaccccccggaacataccgccctccccgccgaccgccgaaatgacagataatatccttgcgccgccccagagcatacagcacacactgtaaaagagtatcagaacactgacaaaccttatagccctcttcctcatacacattatccccctttgcctgtggataagttgtggatattcgttggggacggaggttttttaaaaaacctccgtccccaacgaaccttcaacgtgtccccttttaaagacgcttctcaaaatttccttctacggcgcatccttctgtaaatatcatgaacgcatcgggatctatgctgtgtacgatcctttttatctgtcctacttcgtattttgatatcattacgaaaagtatatatgaagtcttgttcgtgtacgcgccttcgccgtcccagttcgtcacgccccggccggtctgttcgatgatcgccttggatatgccgagcttcttggtaaatatcatcacgctggtattgatgttctgtatatgtactctgtccagcgccattgcaagcactgtcgtatagatcaatgagtagatcactatctcgatattgaacataaacaggcagatcacgtacacgagtacattcatcataatattgatcctgcccacactgaagttgggatacttcttggcacagcagaggccgatgatatcctgtcctccgccggagcttcttccgcgcagcacgagtcctgtgcctgtacccgctatgaggccgccgataatacacgacgtaaggaaatcgtcgatgataggagctgccgggatcggcacaacgacaagaaatatactctgtatcgtaaccgtgatcaacgtctttacggcaaattctttgccgagcacacgaagccccatatagaacagcggaatattgatgatgaagtaaatgacaccggacatatctatccctgagggcaccgggagcctgcagacttccacgaagaaggtccgcagcagctgagcgatacccataaagcccccgttgtacagtccgagggggacgatgatcagattcacacccaatgcaaacagcaggcttcccatgacagcatagaccgcctgtatcagtaattctttcttgttttccttaaacctgcccatggcaaaacctcctgtaatttactgcatattctcaaataatcaagactcattctagcacttgctttagtgatttacaataataatctaaaatataacaaaaaaaggcctaagctcccgctcaggcctgtatcatactgtcattgttcttcctgttttcagtatcattttttgtacgtttattaaactcttcctgctcttccaggcacgcttgtattgcctcattcagcgacagcatcttctcgtccagagtggacaccatctccgcacattcccgcagttccctgctgatgtaatccggcgcgttcccttcaaatttgtaatatatcttatgttccagacttgcccagaaatccatggcaattgtccggatctgtatctctacttttgtatctactacactgtctgacaaaaagattggaacagacacgagcatatgatagcttttatacccgctttcttttggattcttaatataatcctttatggacaataccttaaggtcactctggtttcctatcatctccgccagccggtagatgtcagatgtaaaggaacagatcaatctgacccccgcgatgtcgttcacatattttaccatattttcaatggatgtctcatatccatatcttcttaactttttaactatactttcgggtgttttaactcttgttttaatatgttcaattgggttatactgatgcacatgctgaaactcatcattcagaatctccagctttgttcctacctcttttaacgccgaagtgtacaaaaacataattgtcttccaactgtcaacatcctcgtagtttttaatcgttgccgccatgttactcctctcctctcacatgcgaagagttattttcgtacatggttattatatcataatctttttatattgtcataaacttcacagttatttaagaaagtgattaaaattacacaccgtctaatattcaattcctccccgcgccatcttcccctcgtcataaggatgtttgaccttgcgcatttcagtcgcataatccgcaagtccaagcatacgctccgacacttcatggcctgtcataacgatctcaagccctctcggcttatgctccagaaaacgaatgagcttctcctcgctcagcaccccaagctgcacagcgcataatatctcgtcgaggataagaacgtcaaacgggctgcagaacttcactatctcatccagcgcctttgtattgtaatgcctcagctcagccttttcgtctccgttcatctggctgacaaactttacatgctcccgcccaggcagacatgttatgttttccgtcttctccagcacattcctttcactggaagaattgttcttcagaaattgaaagacaagcaccttaaggccaaatcctgccgcacgcacagcctgccccaccgccgctgtcgtcttcccttttccgtttccatagtaaatgtgtatccttcccgttccagtcataagtcctccctgtgcttccgtcacgtatcaattccgctgccaatattattataatatccacacacgcaaatgtatagacggtttcacacttttatgctttttcccttcgtcagaacacaagaagctgcctgtgagatctgtccaaaataaaagaacagccgcgaatcacatgcgtgtgatccacggccgggtccttttctacaattcaagcttcatatctccaaatcttatccactggcgcttccgcatgaactcagaaatcacaagtgtcacaactgccggcagaatgatctggatgagcagtattttgatcatgacaatggatgcggcttcggtctggatcatcgtctgccacgtcatgatctgccccacaagccctgccgtccccattccggaacctgtcgcgttgctcgtcatatgcagcgccatcgtgccaaccggaccgagtatggcgctggacaggatggcaggcagccagataaccggcctgcgcactatgttaggcacctggagcatggacgtcccgatcccctgggccagcagacctccgatcttgttctcccggtagctggcgacagcaaagcccaccatgttgcagcagcacccgacggtggccgccccggccgcaagccccgaaaggttcagtatgatcccgagggccgctgaactgatcggaagagtgagtatcatacccatcagcaccgatacgacaattcccatcaggaaaggctgctgttcagttccccagttgataagagaaccaagccatgccataaacccggatatgggcggtccgagcagaaggcctaccgccgagcctgtccctattgaaacgattggcgtcaccagaatatccacctttgtctttcctgacacaagatgcccaaatacgattcctatgtatgcggccacgaacgctccaagcggctcaccaggtcccgcatagaccattgcgccgtccacgagcacggcacccgccagaagcttgccggcaaatgcccccaccataccggcagtcgccgcagacacgaccacaagcggactctctttgaatctgtaggcaacggcagcgccgattcccgcgccggtcagtgaggccgccacctttccgagcgcatatatcatatcccccgcagggccgcctatgagcgtaccgatctgctggatgatcgttccgatgatcagggtggcaaaaagcccctgggccattgcgctcagcccgtcaataaagatccggtcaagtactttctttaatttttccatatcattttctcccattcccgctcacaatgtaattacatctgtcttgtcacttgcaaagtctatcacaataccgtgctgaaatcaagtattgatttcggcacggtatgatcgtctgcgctctataaatttaataatagttaataataatttactttttttctgtatttctctcatgttatactaaattatatgttgctatttcagactggcaggccatgttctccttccgccttgccggctcagaatatcgacagggaatggaggtgcactgactatatgaactggcaggatgaattaagacataacatcacaacactggatgaattggccgcatacattcccggcgttgatacgggcgactgcaatgcgcgcaatattctggagaaatatccgatgtcagtacccagatattatctgtcattgatcaatacagacgatgagggtgactgcatccgcaaaatgagtattccctctttctcagagatggatataacaggtacttttgacacaagcggggaatcgtccaacacaaagcttcggggactgcagcacaagtatccgcagactgtactgctcctgtccacaaaccgctgtgccatgtactgcagatactgcttccggaaacgtatggtcggaagtcatacggaagagatcgtggaagacatagacaaggcagtttcctacatcgcggaacatacggaaatcagcaatgtgctcatctccggcggcgattcatttctgcttgacaatgcggccatagaacattatctgtccgccttatgctccatcggccatatcgactacatacgcttcggcacgaaagttccggtcgtctttccgcagcgcattactgaggacagagaacttcaggacatcttaaaaaaatattgtaccaaaaagcagctctatgtcatgacacagtttaaccacccttccgagcttacggaacatgcggttaacgccgtaaactgtcttaagagtcttggccttattgtcaagaaccagaccgtccttctgaaggggatcaatgatgatccggcggttcttgccgggctgatgaagcagtttacaaagattggcatacttccttattatgtgttccagtgccggcctgtaacaggagtaaaaaaccagttccaggttccgcttcggacaggatacgatattgtggaacaggctaaaagactccagaacggcaacggaaaatgtttcagatacgcgctctcaaatccggacggaaaagtggagatcatcggtaaaatggatgacagccatatgatattcaaataccaccaggccaaaaatccggacaacatcggcaggatctttataaaagaaataagcgaggacgcctgctgggcggaagaatgatcagctgttaaaaaagcagaagccggagtaccggcggaccatcagtccgccagcactccggcttctttcagccttttttccgcctcatccagtatctcgctgtccgatgcttctattgtatggtaatggacattacctgtcagttctttcagaggcctggcattgtctgaaagtatcttggccataaattcatccacgtcttttctgctgttaatcactaaatctaccgcaatctgtccatacacttcatgctccactatcacatccaggactctggcccccgcatctacgatacaatacagctcaccggccattttatcgttgtcatgtttcaccatgaccaccctcttgcacgttgccgccgcgctgtccttgccatacaggatatatcctttatttgtggaaaggatattcttgttcgtcgcacgcagaagcgcgatatcctggactatgatctgccggctcacccccagcctcctggcaagagctgttccggaaagaggctctttctctgtctccagcagcttcatgatctcttctcttcttttctctccgtccatatgtcttcctttcatcatcgtcagaatgctctcccctccactgtcaggggtatgtatatttcatacaccatactgccataaaatgcaagtccggacgtatatttttttctattaacagacagtttatatattttataagtttataatcttatcttcatcttttctttagagcgccgtcacatgttagacacaattgttttatatactataactatcaaatgaagctgacgttagtacagcgcagatataacttgtatttccgccggcttcgcctaaagacaataagtttcgtttattatagattgattttccttcccttttctcaagatgcagcttcaccggctgcatctttttttcatgatctgaagccccgtatgccaagcccaagaataaatattcagccattcggacacgtccccgccgttttctccagtttacttatgacgttttgtgcagcggtgtttccgatagagcagcagggagacacagcccacaagggccgccagcattgtaagcacccagggcagcggagtctctgtatcgcccgtcttcgggatgctgttggctccatcgccggcggtacggtcgtgccagcggctgtttgtgtcatacacatggatgttctgaccagagccagtatttggaccagggccaggaccggggttagaagtgtccttcttataggcagccgatacagttacatggtcggcgggcatgacaaaggtggtggaagggtctgtttctttagtaaaactcccgctcttgtctgtcgtccacttgtcgaacacgtaaccggcaggagcaggatctgcctgaatggacacgctgtcgccttcaagatacagtccgctatttgtgttatctgtgccgttcttcacctccaagcggtaggcaggctgcagcgtccagttattgtcaagttttagagtatttttcttccagtcttcagtgtagtttccttcctgaccggtgggaaaatagattgtaccggtgggtgcaatacttgcaaagacctggaaattcaaagagcctatctgaggcgggctgtcttttttaaaggtcaggtttgtaaggctggtacagtctctaaatgcatagtcttggatggattgcagactttgtgggaaagttacgctttcaaggctggtgcagcctctaaatgcatagtcttggatggattgcagcctttgtgggaaagttatgctttcaaggctggtacagccctgaaacgcgtactttccaatgaattgcaggctgtctgggaaggacacgcttttaaggttcttacagttatcaaacccagatacgccaatagtttgtacgccttttggcacaataaagctggtttcctcttttcccagtgggtaaataaggagagtttccattctcttgtcatacagcacgccattttcgctagtaaagttcgggttattgtccggtactgtaaaagcggtaatgctattgcagccagtgaacgcataactttcaatggtttccagactttccggaaagtttaggcttgtaaggccggagcaaccattaaatgcaaagtcttggatggattgcagattattttggaaggttacgcttttaaggcccttacagtccctaaaggcattagatccaatggtgtgcaatgcaaaggggaaagacaggcttgtaagggctttgcagtccataaacgcattgattccaatggattgcagactctctggaaaggacacgcttttaaggctcccgcagtccttaaacacagagtactcaatggattgcagactctctggaaaggacacgctttcaagactggtgcagttattaaacgcaaaccgcgcaatggtgagagttttagtggaaaggcagtgcagttctgtaatgtttgagcactgttggaatgcctgttcaccaatggaagtgacgctgctgggaatggtcagcgtgcccgtcaggttttgattactccaaaaagcaccgtttacgatttgcacaacatcgtaattcccgttattgtctgggtcgttgtccacggttatggttgaagggatggacagattgtttccgttataggattgattgacgcccacttccactgtgccgttttccccgccgtctggcatcgttaaaatgttgtatttcagaccgtccactgtcactgtactgcccggggctttggctgctcttgacggcgtaacggtatcatccatttgcgctttttcggattcgtgaacggactgctcggtcttatccgttgtattttgagatagattctccaccgttacagtaactgtaaggtcgtcaccaaatacccccccccctgtatattcttcagacagctttgccttgaacacataattgccgggcttgtctgggtcataagcttcgcagcgccaggctgggctgtccagcgtaactttgccaccgtccgccgttagctcagggaagggaatagcttcttttgctgtacctaagggcacggcaataacgtccgctccctgaggaagtgggtccactgttatgggggcgggtgcatcctgggccagcgccggcagactgaataactgacagaccagcaccgctgtcataacggcacataaaaaccgtttcgtgattctaaggctgcagggcttttttttctttttcattattcttcatcctccaacatttcttttcattacgtattacatatctttgccatcgagatagctcttgtccgccagcgtgtccaatataagcccaccccgcagtgaactgaaccgcgttttggggtgggattttctcgtacaacgctttcagcttcgggccgcgtcacggcaaactttgctatacaacttcaggccaacttggcccgaagtgcgctccgctccgttgccgttcctttccccgtacgcccggctgcgcagggcgtgcgggggctcattatccgctcgaagtggcggctgtccgttttactgattcctgtatttccgctttctgtaaaccgcaaagcccgcgacgcataccagcacgatccacaaggccatattactttcgtcgcccgtttttgcgctgccgccgcccgtagccgtgggcttcggttcctgttgttttggaactgcaaattgcaggtcgcccgtgctcaccgcgccgcccgcatcattaaactccaccgtcagcgtgtatctgccctccgggagtgttttcaaaaactccttgtacagcgtcacaatcacgctgcctttttccagtttaccagcattgccggggtagcccgcccatgtgaggtctaccgacgtcggagttttgttcacctgtcccatttccttgccgtccagcaggacgcgtccaatcagcgcaaagtcgccgttcaaggtaaatgtggcgtccttcgttaagtcaacgggcgtgaggtcgtccgtggcccgcgtgaagctcgcgcttgcgataatgctgtccgccatgcccgccttgacggcgattgcttttaccgtcacggtctttgtcagcgtaaacgtgccggtatagcgcgtgctgcccgcatttggcgtgttgccgtccagcgtgtagtaaatatctgcgcccgccgtcgtgcaggagagtgttacgctctgcgccccggtgaacgtcccgccgcttggagagattgtgggcgtgtgtacatccaacagcggcagcgtcacatttgcgccggtgacagcaccggcgttgtagcccggttttgccgccagccgcgcgtagcccgtgaccgtttcgcccggcttgcagccggtcttgctccgctccgcgccgaaggtcgttccgtcaaagctgtactccgcgcccgcaatttccggtatcgtcaccgtgtaatccgtttcaccgttggcggtatacgcaagctcgaacggggccggggccggttgatcctggtctttggcgttgactgtaagcgtggcggtgagggcgatcgtccccgtagagggctgcgccgctggggtatagatggcggtcgccgccgcatcgtcgtcaaagcttccctcatttggactggccgtccacctcaccgtatcgcccgccgccgttttggtgaaagataccgtcgccgggccgtataccacaacgccgctgcccgcggctgtgccgtcgatggtggggcttgtgccgcccgccgcgccggtaactgccacggtgagctttactcccacctgcaggcgcggtgaagccacgggccttccccaaaaatcggttacctcgccctgcggggtcgtctccacccagatatatttgccgaaatcctccccggtgggggtataatctttggtgcgcgcgaccggcgttcccaagccggtttccctgtcggaacggtaccatgcgtagcggtgagagccctccgcgcccgcttcgtttgccgtataaattccgggcgtgacggtgatcgcgccgcccaccaccggcacggccgtatcatagctggcggcggtgatggcgggaggttccagctggcggcacaggttgatcagcttcaggttgcccaacgcgccgctggtgaattgatagccctgcggcagggcgacggtcacgctgccccacgcatagcccttgtttgcggctgttactacattgccgatctccagcacccaatctgttttcaattgcccctcgtccacaaggcggagcacatcggccgcgccgccatcgttgaaattcagcacgacgcagttctttgtgagcggcacgggcacgtcgaaccgcaggtcgatctgcgtgctggtatccaggttttgggttccgttcgcctttgcggaaacaaagccgacctgggtgacgccggtttcaagcgcgacgtcggcgtccgctttgtcccggtcggtcagctcaaattcccgggtcgtttgatagtaaggaatgtcgccgatggtaacgcccatcaccgtcacctgatacgtcccggccgtaaggccggaaaaaatatatttgccgtcggcgttcgtggcggcgctccccaccctttttccggcggcgttgtacgccgtgacctgcaggccggaacgcaccgggctgccgttcgcgctcaccgtccccgaaaggctgtacagggaggaaaacaccggggtgacgacgacgtcccgatcgggcatggagaactggggcccagcatcgtcatcgtattggttcgtaccgtttatccatgttacggcgggttccgtatcccagcgtacgaagtcgtagccgctttgcggccgtgcacccaggctgacaatattgcccgcgccgccggcggcgccggaagctatccagcccgtgccgccaacggcgctgttgaccgtcacggtatggatgtcgaggtagtcaaggctccacccgccgggaaaaagcccgagcaccttttcgtagcccgtcgcgcccttcgggcagtgaatggaaccgccgctccagccgacatccttaaacgtaccgtcgggcagctttggcgcctcggcctgcccgaaaatgacggctgaaagttttcggcatccctcaaatacagactcgcccagcgtgccccgaaaggcggataaatcaagcacttcgagagactcacagctttcaaaggcgaatgaaccgatcgaggtgacgccgccggggatcgtgaccgttccctttatctggaggccgctaaacgcacatatcccaatggtcgtcagtctggcggcgccctgcaaattcagcgcgaaaaagtacccacccgcaaaagcgtagtttccgatacggaccacattggccgggatggtcaggggattggttgccctgcaatatgcaaaggcgaatgccccgatttcggtcaggttatccgcgccggagagatccaggtttttgatggcaccgtcattctcaaaggcttgcgggacgacctcggtcacccggtagctgctgccgccgttgctgacggcggcgggcaccttgagcgacgcctgcggcgcgcccgcccagcccgccagggcagcggtgcgttcgggcgcttcggtgagtgtccagtattgcagcccgtctgcggcaaattcattataaagcacgacggtgatcgtcgtcgtttccccggcggccgtatagcccgccggaagcgccaattgaaacgtgtaggttcccagcgcgtccgcgttgaatgccgcgcattcccatgtcaccccggcgatctcgatcctttggttcttttcatcccagcccacgatcgaaccgggcagcccgaggtccgccacggaatggatttcgtccacgtcataatatacgggattgttccacttatcctctccaagggatacagagatcacggtcaccgtttcctccgcgccgaacgcggatgccgcaaggggcagctccgccactgtcacggtgatttgcggtgcttctgcttccggcgcggctgcatacccctccggcagcttggccgtgaacacgtattcgcccggcgtgtttgcgtcaaaattgtcggcctcccatatcacgccctcgatggcgatggtttcgccgtctgcgtccgctgccttaagcatttcaggcagcgcgggcagtcctccgcctacggcgatctcgtaggctgccggttcaatttcgtcaaacgccgacaccactacgggggccgtttccggcacggatggagcaatgccgttcggtggctggctgggttgcccggttaccgtttcctccggcacgggcgagggcgtttcgtcgttcgcctgtattgtttccccggctgtcccttgcggctcggctaccgtcacggtcacggagatgtccgcctgtccgtccgggggcatatatccctccggcagcgcggcggtaaatacataaccgcccggttgctgcgcgtcgtatgtttcagcctcccacgtaacgctgtcaagcgatacgccgcccgccgtcagcagggggaaagggatcgcatcctgcatcgttccaaacggcaccggaatcacgtccatcccttccgggatcgcgtcaaccgttacggctgcactctccattgtaggcgcgtcctgcgccagcactgcggcgggcaccagtgtcacaaccagcgccagcacgaccagcaggatcacaaaccgttttgttattctgtattttttcttcatgatttttccccctcatgtaccgtaacttttggatgaagttgtcttgactataacacaaaaacaattaaaaaagccgaaggtcgcaattttgtgaccttcggcttttttctgtgcctataatacctcttcaaaacggtaaccctcgcccctgcgggtcgtgatggtgtagccggagccttccagcttcttgcgcagacgatagactgtgtttttcactgcgctgtcatcatctgccattggctgacgccacactgtttcatagagcagctgtgggctagtgtctttactcctgttttgcatgagatacataagcagcgcaaattccttttgcgtcagcagcatatcctggctggacagataggcacgctgggcgatcacatccagctccagggcgccgcaagtcagcaggtgttccctcccggcactttgccggacccgccgggcaaggtcataatgcgcgctgacccgcgctgcaaattcatccacactgtagggctttgtgatatagtcgtttccgccggacttcagccctttgataacctcatgctgttcatccagcgccgtcaagaacagcaccggggcggcagtatgcctgcgaatctctccacagaaatccagaccgctgccatccggcagcatgatatccagcaccagcacatctggctggctcttgagctgtgtgcgtgcctgtaccagagtctgggcgcacagcaccctaaagccgtctcgttccagtatgcgccggttcgtgcgcatgatcgctttgtcatcctccacaagaaggactatgcctttgtcatccattctgttgccctccttccagcggcagggtaaaaccatatcgcagttcctttatccgctccgcttgtttttatctgacttactctacattgtatcggattatccacatcatatcaagcacaggcagtccgtccttatacgagttgttaacttctcagatactgctggctggggactgtcaggatttcttggcaggcagctttttctgtctgtcattattataccgtatcggcatttacatttttatcttccggtgctatactcaagtttaccggcattgaacagatttacaagacaaaggaggggcctttccatgttccgattatggggaaaagaatttaaagataataagatgctgcgggacactgtcatctgtgatgacagcgatgatacccgcacacataagatattcagcgctctcgacgccatctgctacgaatttgacttgagcaagccgatctggcttgacgctacggttgaagaattcagaagacatgacaaagcgagattttatcaggacaattttgtagattccatagattttgactacctggagatccatgtcattgaagaatagcaacagacaaaaacagggtcagatgctgataacagcgtctgacccttattgtgtatccgactgtttttattcgcttcgtatcgctgccagcggacttagcctcatggcccgcagcgacgggaaatatcctgcggctacacctacgaataccgcaaagcccatggagagcagaacgagccaccacggaatgtatgatatatttccgtcgatccccatagctgaaccgtttccggtgagaaagttgatgattccggacatgataaaactcagtatatttcccaccaatccgccgatcaggccaatgaatgccgcttccagcagaaacatctgctttatatttttcagactacacccgagcacttttataacgcctatctctttcgtacgctcatagattgacatcatcatcgtgttggcgattccaatcgccgcgacgagaagtgataccgcgccgatccctccaagtacagcctgcacgatggcaaactggcttttcatgctgtccagatactctgcatttgtctgtgtattgtatcccatctcgcgtatgatggatgatacttcttctaccttgtctatatcatccactttcacctgtgccgatgtatagcagaattctttgtacggtttgcctgatttagtcgtaggctgcccgggcacagttcttccggaaaaatcttttttcagcacctttttcaatgtctccagatcacaaaaggcgctgtaagcgttggcattataatcatccggtccgccggcaacaataccgctggccgtaacagcatgtttcttgaccggctgggacggctggctttcaccgggtcccccggattcatttccaccgctgtccgaatttccaaaagactgttcctggctcctgaagtagccgtcctgatccagaataaggaacacggagtctttcataagatcaatttccggcagttctcccgtatcccaataactgctctgggaatttctttccgaaaagttagttatcactgtattgccgtacagtatatcaagctggcttcctccctgcttcggaaggcttccttcgccgagttcaatgttctttgccttgagcccctccggggtcataccgacaagctgtatgtacgcctcgtattttcccttcagcatgatcaccgacatttcatatacaggggcggccgtcgttacatgccccagctctgaaagctgctttatcgtccggtctgtcacatactgggtagattcgtcagaattttcctgtccggaataggccatcatagactgccccgcgtcttttcccgttacggttatggtcgtgaggccccctgactgctctacttctttatataacgactgctgcattccaagtccaagagaaatcattactacaatggatgctgtaccgatgacgactccgagaacagtcagaaacgtcctgagctttcttcttttgaggttactcccgctcatcctcagaaggtccatccaattcattcagcaattcctcctctttatccgccatctgttttttcttctttttctttatgataatgactgccgccgctgccgctgccacaatgatgaccgcgatggcgatcggaataacaggaaagcccccctgctctgtctcttccatctctgccgccggcatatcattcatcccttcaggaccgacttcgatctgaaggtcttttgtcatggtagagacctttcccgcctcatcttcataactcagcgtcatcgtcactttttcactgcctgcgctctcttttgtcccttccagcgtggcgtctatggaggcggttgctccggattctacattccctataaatgtctccgcctttttgacgcatttgccctcaaaggaagcttttacgttatacagctttattctgcccagattgtacagactgcacataacatttgcctcttctccgaccgtgatcgtctccgggctgatctcaaattcactgaattcaaacctggcatcctgcttcaccggtatggagatgctggacgcgccttctatctgcgctgcatttccgtcttcgtatttcatgctcaggtctatgctgtacggcttctggagcagatcagccttggcattgagctggatcgttatatccgcagcgccaccggcttttatgccgtccagatagatagaactggagccggaggacggcagaaaggccggtgacgttgtctgctcatccgcgccttctgtaggagccttcaaatcaaaaagcatattgctcacacgtgtcgccttggatgtatttttcaaatgcaccgtcagcttaaaattactgcctgcccgcacctctgcagggtctgtgtcaaaacccgtcactatcactctcggaacagacccggtgctgccggaaccttcttctccgccgccgctgtaggatgcacctccgttgctgaatccgcccgcatcggcagatgcgggaacaccttccccgctgccggagctggtctgcacctgagccggccgacgctgttcgtcctgtccggaattatttttcttatcctcaggcttagccgttgtcagtacataaaaagactggcttcctgaaatgccgccgtctgccgtaaagttaaacagcagcgtgtaacgtgtgcttggcacatcgtcccgctcggtaaagttgaattcaaccggtttcgtctcctttgcagccaacgcatctattttggccgtatatttctgtgcttctgtcttaaacggccactggctgacatcatctttcatatcaggagacacaacaatattcttgatctccgaatcagtattatttttcacattcaccacaaacttctgcggcttctgatactggtaagtcagaacccccgccgtctccaatgttatctgatcacccgcagcttttgccggaaacggcagaaatgtggaagccgttacggcggatacgatcagcacggccagcagtttctttattgtcttcataatgataatcctccctcaacagtttcttttcttctgttttcttctatgtttataatatttccgtctcttatatgaaagatccggtcagcgtatgttgccagatgggaatcgtgcgtcaccatcacaagcgtctttttctgctcccgcacgacctgctgcataaggctcatgacctcctcggatgtgtgggaatccagattcccggtcggctcgtcggcaaatatgatcttcgggtccaccacgagcgccctcgccaccccgacccgctgctgctgcccgcccgacatctggttcggtctgtgattcttgtgttttttcagcttgaccaggtcgagcatctcatctgcctttttcagtctcttttccttggacattccccggaaacttaacggaagcgccacattttccagagcattcaatgtaccaagaagatgaaatgactggaagataaaccctacattttcgcggcggaactttacgagctgttcttcattcagcgtctcgatatgctgtccgccgatcacgacgctgccttttgtgggcttttcaagtcccgccagcatgttaagcaatgtcgactttccggaacctgacgtgccgacgatggcgcagaactctccttcatagatactgaaatcaaggccgtcaagagcacgtacaatctcatctcctacccggtataatttgtacaaatcccttacctcaattacctttgccatatgtccctcctattctactctatagtctacaatataaaaggaaagacttaccataggaaattctgaagtttttcttaagtatgatgattttatatgctttttcaaaatatatatattgacattatatattatacgtcgtataatatacttataaaaaacatatagaaagggtgaggaaatgatattcccaatgaatacaccaatgtttgacttgcttgtcctcgcggtagtagaaaaggaagactcctacggataccagataagccaggtgataaagcaggtttcaaacacaaaggactccacactgtacccggtcctgcgcaggcttcaggaacagcggtatctgacagcttacgaccagccctaccagggcagaaaccggaaatactacaggatcacagacgaaggaagacagacttttgaaatgctcagcgaggaatggtcactgtataaaaatgcagtcgacgatatagttaagggaggtatgaacattgaatagggcagattacatgaagagcctggagcatggccttaagcggcttccaaaagaggactatgaccgggccatcagctattttgaagaatattttgaggaggcagggccagataatgagaaacaggcaatcgaagatcttgggtcgcccgcgctggccgcagaccagatcatccgggatttcgccgtggagaacgctgaaaaaccgacgaagaatgttaagagaagtttctccgccgtatgggtgggtattctggccgtctttgcggcgcctgtagggcttccgcttgcatttgcggccgcggcgttgggcctggcttttatcctcgtgatcgtatcacttatatttgcagtgttctgtactgctctggcatttgcagcttcgtctgttcctgctgtcatggccggcatatggttcctctttacctcacccgccagcgggatcgctacgataggcgcagggctcatcggcgcaggcatcggtatctgggtcatcataggctgcatcacactttgcagatggttcctaaatacaatgacaaaactattcggaaggatcgctaagggaggaaacagacatgaaaaataagagaagaatatggttgatatcttttctctgcgtcggagcggggatcgtgatactgatacttggattgatgctggggggccgtcccggcttctatatcgacggcagcggaatccattccgcggcagaaaacggcggaaaacgcagctacgtcaaaaacgagaaagaactgcaggaatttaccgatattgacatagacctggattatgccgactttcagatcattccatctgataccttcaaaatcgaatactgtctggacgggacaaaggatccggtatgtactgtcaaagacggacggctgacagtaagagaagccgattacaaacgcattttcaactttacatttatttctccgatgtcagacgattttaccgacagctatgtaaagctttatatcccggaaaatacggtatttgacacaataaagatactgactgaagacggcgacattctgctgccggccttaaagtcagatacgctggaccttgaatcagactatggggacataactgtgaaagattttgagggcagaagactctttgcggagcttgaggatggttctttttccagtaaagggataaaagtggatgaattaaagctttccaatgaatacggtgatatcgcgcttcaggatgtaaagtgcgcttatcttgaagccggcttaaccgacggtgactttacggcagacagtctttcttccgacaggctggagatcgacagtgaatacggggatgtttttctcggtttatccagtacggtcaaagaatatgatctggacctttcaacagaatacggcagtattcaagtgccgcaatatgatgtgatatacggggaagacggaagtcagtgccgtgtggctaattcatctggaaaaaacgtaaaggtaagctccgaagacggggatatccaggtgtttgacgccagatgatctgtaccgtccgcaccataagatcaagcccgccggctttgtcaagccggcgggctttttatattatgcgatctgctctaatacttcttctgcaatatttctggcgtggtctgagatacgttccagacagacgagcgtgtccaggaaaacgatacctgcctctgtattacactggttgttcgtcagccgtttgatatgtctgcttcggagtgtgatctccagatcatctgcctttgtctctttttcgatcaccttcagggccatttccctgctcccttccacaaatgcccgcagcgcgtatttgtaactgtcaatacacacatccagcatctcttccagctgttcttttccgatatcggaaaaagtcacttttttctcgtgaagtgtctcagcgaactcggatatattttcacaataatcgctgattctttctatatctgataccatctgtagcagatgggccacatcctgatgctccctctcgctgatctgaagggaacttagtttaatggaatatgcggtgatccctgcgctcagcctgtccaccgtggattcttcgtctttcaaaaactggatatcgtcatggcttttcgtaaacagaacatttcttgccacatccagtgagtcttccacaatcctgcccatacgcgcgacttcctttacggttgactgaagtgctatgacaggtgtttccagaatacggtcgtccagaagaactttgctcttgtcctgctctgcctcttccacccttccgatcttcttggccagcctgatgatccagttggacattgggaacagaagcactgtagttccgatattgaatgccgtatgcaccatacttatctctgtctgagtgatcactcccgtgcctgcagatggattcagcacctcaaagtatatgatggcgatcacgctgaatatcactgtgccgattatattaaacagcagatgcataagagctgctgtcttcgcattcttctttgcccccatactggaaagcatggcagtcacgcatgttccgatgttctgccccattatgatgtatattgccgcgctgaacggcacgagccctgccgccgcaagactctgcaggataccgacagaggcggatgaactctggatgatcgccgtgacgagcgcgccggccaatatgccaaggatcgggctgctgccaagtgtcacaaatatatttcggaaactctcggaatcctgaagcggtgcgaccgcagaagacatggtcgttataccgatgaacagcagaccaaagcctacgataatactagctatttcctttgaggagcgtctttttccaatgagcatgatgaccacaccgagcatgaccgcgatcggcgcgagctttgacgggcttaaaaattccgcccactctacagaggacacgagccagccggtcactgtcgtacctacgttggcccccatgataacgcccattgcctgactcaggttcatgatacctgcgtttacaaaacctacgaccatgactgtcgtggccgaagagctctgtatcaccgccgtgatcgccgcgccgagcaaaactcccatcagcttgttttttgtcaatacctccagcagagacttcatcttgtttcccgctgcattttccaggccctgtgccattatctgcattccgtagatgaacatgccgagaccgccgacaaagggaatgataatatttacgtagtccattgatttcctcctaatgtacccatatccttttaaaccatcatttttacaataccattatcataaggagaaaacaacaagattttttactttttcatttttggctcgaatatcaaagatgccagatatccaaagatgagagccgcggagattcccactgcactggccttgaatcctcccatgaagatgccgatgaacccgtggctgtctaccgcctccttgacacccttccagagcacatttccaaaaccgagcagcggtacacttgcgcccgcgccggcaaacttgagaaaaggctcatatatctgaagcgctccgagcactgcgcccgagcatacgagcagcaccatgatgcggcccggcatcagtttcgtcctgtccagcaggatctgcacaagagcacagatcagacccccaatccagaatgcattaacataatccatatcctacctccttgtgtgaattggggacggggcgaatcggcaaatcggggacgggggtattttaaaaataccccgtcccaaactaaattctccctgtcccttttttattttgccgtgtccctgatcagcagtgttccagcacgataccgtgtgcgatccccggcacgctttcgccttcgttgaagcttaccgtggacatgagcgctcctgtcggtacaaagagaatgcgcttccattccccccgcgcaagttttggcagtatataagatgaaagtgtgaccgctgcacacccgcagccgctccccccggcgtgggtgtcctgtgttttctgatcatagattgtcattccgcagtccatatgattcttctttatatcaacattttttcccctcataaggtcgaacaggatgctttggcctacataacccaaatctcccgtgacgatgcggttgtagtcatccggcgtacgtccgaaatcttccaggtttctcagtatcgtatcacaggccgccggagccatgcatgctcccatgttctgtgaatctttcagtccgtaatccactatctttcctacagttatgccagtcacccttacgtggctgcgttttgttcctactacgaatgctccgctgcccgttactgtccagtgcgcggaaagtggtctctgattagcgtatccgaggggaaaacggaattctttttccgcacttccaaaatgactggacgttactgccagcatgttatcgccatatcccgcagcgacgctcatggatgcaagtgcaatggcttctcctgatgtggagcaggcgccgtagagaccgaacatcggtatgttgagttcctcaacccccatggaagtcgccaccccctgcctcaggaggtctcctccaaacagataccttatttctcccgcttccatatgcgccttgccaagagcaagaacacaggcctgtttctgcatcgtgctctccgcggcctcccatgtatcttcaccgaagaggtcattttcttccaccatatcgaacatactgccaagcgggccttctccctctttttttccgacaacggatgcactttcgacaatataaggcgaattttcaaatgcaatactttgtaatccctgaatcatcctagtttaccttcctatcttactattccttaattacataaaagaaccgataggattacctatcgattcttatgctttccattttcacctgattacatacatctttttccggcttttgcaaaaacaccataaactcatgggccagtatcggaaatgcagccagtattgtaagtctgagccactcgtggaactccaggtggactgtcccgaatgcttttatcagaaccggtacttctgtaacggagatttgaagtacaaagcccaatacgaaggcggcgatcatccatttattttcaagatggttcatccggaatacggatttgtggatatctctcattcctaccgcgtggaacagctgtgacattccgagcaccgtaaatgcgtatgtctgtgcacgcatgagtatgtcactgttctgaagcgcaagcgcaatgttgctgatcgaaaaggaagcgcctttactcatgatcagttcataaggtactgtaaaaaatgcagtcaggctgattccggcaatgagcagtccatagaaacaggtacacgccagtcctcctctggcaaaaaggctttccttcggctttctcggcggctcttccatcaggctgtcgccgtcattttcatcaacaccgagggccagcgcaggcagagagtctgtgatcaggttgatccagagtatatgacttgacttaagtggtgaggctatatcacagagtacggccaggaacattgtcatgatctccccaagattggaggaaagaagaaatatgactgttttgcggatattctcgtatacacctctgccttcttctattgccttttcgatcgtggcaaaattatcgtccgtcaaaatgatgtctgacgcctgccttgccacatccgtcccggtcatccccattgcgatgcctacgtctgctgatttaagcgacggcgcatcattcactccgtcaccggtcatggcaacaatatttccttttgtcttaaatccttttacgatacggactttatgctcaggcgacacacgggcaaatacacggacatcgtctaatttcctcaaaaatttctcatccggcagactctggatctcttcccctgtcatgcactgctcctgacgctctactatgccgagctgtctggcaattgcaaatgcggtatctacatgatccccggtgatcataacagttgtgacacctgcctgcctgaatcttgcaacggccccctttgcctccggcctggccgggtctctcatgccgaccatcccgacaaaagtaagttcccgctccaccggtgcattgccgccggtccgcatggccactgcaagcgttctcagcgcctgtgaggacattttttcgatcgcctcctggatctgtctcctgtgtgtatctgtcatcgccgttaccttgccccgtatgagtatacggctgcatcttttcagaactacatccggggcgccctttgtgtaggtgatatttgttgaaccatttttatgcatggtggacatcatttttcgttcggaatcaaagggcagttctttttttctcggcatctcccgctctaatgtctctctgcggataccatattgcccggccagattcaaaagtgcaagctctgtagggtctccaatgctgctgccgtctttttggaccgcgtcattacacaaagtcattccttgcagcagttcactgtgttccctcaatttcagttcactgctgtctacgatcttctcgtcaatataacacccttccactgtcatcctgttctgtgtcagtgtcccggtcttgtctgagcagactacactgacggcaccgagtgtctccacggagggcagccttctcacgatcgtatgtactttgaccatccgcgtcacgctgagcgcaagacagatagtaactacggcgggaagcccttccggcacggccgccaccgcaagtgaaatagctgtgatgagcatttctgccatattgcggtgctgcagtaccgctatgaaaaataatgcggcgcacagaccaagtgaaagtatgctcagcatcttaccaagctctccgagccgtttctgcagaggcgttatctcttcctgactgtcattgatgagcgcggcaattttaccgatctccgtgttcatccctgttgccgtaactatgccaagcccccgcccgtttgtcactatcgtagacatatacgccatatttttccggtcgccgaggggaacggaggaggctttgtatccacgccccattccttttcccgctataaaatccacatttttttcaattggaagcgactcacctgtcagtgcagattcctctactttcagattattcgccttgacaagtcttaagtccgcaggtatctggcagccggcgtccagacatacaatatctcctggtacgagggaggatgcctgtacttcctgctcttttccttcccggatcacgaccgctctcggacttgtaagtttcttcagagagtcaagcgctttttgagcctttccctcttgtatgatgccgacaaaagcattcatcagcactactacaatgataatgacagcgtcgctgacttcctgaagcagtatagaaactgccgccgctgccaacagaacatagatgagcgggtcattaagctgctcgaagaaagattccacctttgttttcttctttgcagacttaagctcatttgcaccgttatcctgcagacgctgggccgcttccgtataagacagcccgtactcggaatccgtctgcagttcctcgcaggtctccctcactgttttgttttcaaacataatattccctctccttatccacattaaccccttaaaacggaatttaacaggcctgtacttcctgtcctagtacaaccttatgcggtaagaagcgggaatatgttgtctatcacgaaaaatctatttgacgatatctgccagctttaaaacccagtatccaagcccgatgagccagctcgtgaatataccgtacaggatgaccggccctgcgatcgtaaatatcttacagccgatccccatgacctgtccttctttcttatactctatcgcaggcgccgccacggaattggcaaatccggtgataggcacaagcgcccctgcacctccccattttgcaatgctcggatacagattaaacccggtcagcaatacgctgagcagaatgagaatgagagacgtccagccggcgctcgtatccttatcaagccccgccttctcacaatagttcagaatcgcctgtccgatcacacagataatacctcccacgacaaaagccctcgccatattggccggtaagttgtgcatcggagttttctgttttacgtagttttcataagcctgctgctgtttttgcttatccacaataattcctccttttggggatatcttcggctgcgagtggttggggacgggggttttttaaaaaacccccgtccccaaccactcgcagccctgtccccgattcattttgtcctgtccccttttaccatcggtttataaagaaaataagtgcgccgattcctttgcccagcgccatcccggctattagatacgggatatatctcaataattttacccggcggataaagatcgggaatacgtttaatatttctgccagcgccatagaccagcagcctacaaatatacctgcgaccaagccaaatacaggcagcaaaaaaccgccgtgcggtatggctattttataaataaaaaatatatttccgagcatcccgccaagtgccacacaatcttcatacaacaggacatgctcgcccgtatgcgtccggtctgcaaaatcggatacgactccaagtccgatgataaaggaaaacagaccgcccgcaacgactacaccggcgctaagtccgatgagtgccagaagtatttgtgctgcccacatcctgctctttgccctttctggaatatgtttctatcaatgtcgtctgaatatcattttcatacagacgcatctctacttccattggagtcggatctacggtgaatttcttctttccaaagtgattaaagaatatgagtatacctataataattccaatacagtacgtaagttcaagtaccgtaaagccatctgacttctgacctgtcacaagctcatatatctgggaaaatagtttgaccgtatcaacgtcattgttaaaggccataatagaaaatgcggcacctatgaacgtaatgacgatcacacaagccgccttcagaagatgtactagtcctccggccgtctgctgctgttcatacgttacgataaaatcctgttcaccgagattctgtatatccatgttcgggaactgttcatggataatttctatgacctttaagatagatattgctactctgttctgatttttcttatctgtgtgatgaaacttcagaagcttcagcgtattaagcttcgggacgaccgaagggttggaacactccattgtcagaacatcgccaagcgtaacgtctggtttggtaacttccacgtttctgtctgcttttatatatactgtctcgctgtttgccgccatgcctacaccctgctttccatttcagtcatgatcaaagtaccctcgctgacatcgcttttgcttcttacatcattaaaataatagatacagccaatgatcacggctgctgccacaacacaaatcaagcatacccggagttttttcctggcctcatccatactgacaccctccttatacttcttttgtgggttagtatggatatatttcaggaaaatatacacgggtatgctttttatattctttctcgcagacgttttaaaattttcttttccagacgcgatacctgtacctgggatatacccagttcctgacctacctgcgactgcgtctggttggcaaaataccgcagatagataagctgtcgttcatctttgttcagatattccagcagctgctgaagcagcatatgattcagaatcttctcctctccgccttccttttccggcagcttgtccataagacggatctcctgtccctctttctggtagatcggtttgtgaagcgactcaatgtctccgcttgcgtccagcgccatcgtgagttcttccctgtcaacctcgagatattctgctatctctgtgatggtcggttctctccccagtgcttcctgaagcttttcctggcagagatatgccttgtaggaaagctcctttaatgaacggctcacctttatcatgccgtcgtctctgaggaaacgttttatttcccctgatatcatcggaaccgcataggtcgagaacttgacttcataagacatatcaaatttatcgatcgctttcaggagccctatattcccaacctgaaacaaatcctccgcctcagcgccccgattgtaaaaacgttttacaatgcaccatacaagtcctgcattttcctctactaactgtgctctcgctttttcatccccctggtgagatttctttatcaaagcgattgtgtggtccataccttacgtcctttaccaatagttttttccatttttacggtcgttccttttcctggttcagatacaacatcgagatgatccatgaaggcttccataaatgaaaagcccatacccgagcggtccagctccggctttgtggtaaaaagcggttccatggccttttctacatccgggatgccttttcccttgtcctcgatctccagatacagcgtctttccttctgttctgcatcggatataaatattatgtacttcattttcatacccatggataatagcgtttgttactgcctccgacacggcagtcttcacatccgatacctcttccaccgtcggattcagcgaggtcataaacgccgctaccgtgaccctggcaaatgattcattagatgaacggctgtcaaagattaactgcatttcattcgtattttccatctacttatcctcctcatatatcttcataatttttgttgctccggacatcgtcaatatttttttcattctttcattggtgtggactgcacacacctctcctcctaacatatagattcgcttgtagcgtcccataatcacgccaatccccgaactgtcgcagaaaactgtatccgcaaaatcaaaaatcacataacggatatggttcttttcgatcaaatggtcagcctcgcgcctgatgctctctgcattgtgatggtccagttctgtcggcaggaatatggtaagacaattctcctgcacttcatacttcatgttactcctcctcttttctacgttttatatagggacagggcaaatacaattggggacagggattttttaattggggacggaggaaatttaaaaaacctccgtccccaacccctccacggtcaccaaaaaaggacatgcaatctaattgcatatcctttatcttctgtaaccctgttttttccttattcagtttgaccgtcgtctttcttatccccgccggctttctgtgcatccagcgcttcctgtgcgccggccgccgcctcggtattcggataatcttcgataatcttctggtactcgatattcgccttatcctgatcgcctttcttttcataggactgggcgagcagcagtttggcgccgccgtcagaatatccctcatccatctgcattactctttcgagattactgatcgcagtgtcatagttggcaacttcaaagttattctttgatgtggaatacaggttctcacacatcttcggatatagttctcccgttatctcgtcaaagcgttcccgccctactgttccgagagactctgcgttcactttcagaagctcatccagcatggcatcgtcactcatatcttttgcactgtaatgctttgatatgttcataacgatctcataactctcctgagtggaagtcgctgtcgctttggcgttctctgtctcttcgctcgtggagcggtaatcctcaagctctttcttcaacgcgcttatctgtgccttctgcgttgctatctgatcgctgaaagccacggtctgtttattgagcttatcctgcctggatgcattgatcgcaggcatgatcataaaccacatgactgcaacacctaccaacacaccgatcgctatgttcacaaccgtatgcagtcctgtatgctctttaaagctcgatgacacaggctggatgatcgtttcatttccaatattgtaagtgacagtctgctgctgttcctctgcatccttttctttgatccgcgcgttttttgatttgcgcacctgattcagctcatgcatatacctgagcgtgatgtcatccgtcgtatccagcttgtgggcgatcctcaggcactgtcttgccttggaatactgctccgtctggagatacagcagcgcgagaagctgatatgccttcacaaatgtcgggtgggcggcaaccactttcttaagctgtatgatcgcaagatcctccccgttctgccgggcatatccaagggcctgattaaacttctttattgcctggttcagcccgtcaagttccccaggcgtctcctgaagcttctggatatagtaattagaaatattttcatgagactgaaaattcttgctcagtatccactccaccagagcctcaccgatatctcccctgccgtaatatacaagaccgagaagattccgggccgcaatgttggctctattatattgtaagctgcgccttaaggatgttatcgcgccggataaatcccggatattggcttttttaagtccgtcgttataccaataattggactggtataagagtttcattgaataatccatatatctttgtaacccttcttctacttcgtctgttctatcatttccttcagtatatctgtcatatcagtcaaatcttcctgataaacggcatcctctatatcttccacttccacactgggctgaaatttcttcaattcttcttcaaaatcaagcatgttcctcgcctcccgccaacaacttcttcaccatgcccgccagatacagagagccaagacagtatatctcgccttcccccctcatatcccgggccgcgtcaagggcatccctcaactctttttttacgatcacttttttatccgtatatttttcaaatacctgtcccaattccagagccggcactctgcgtttatcttcaatctccgtgacaatataggctgatgcgtccagactgccgcacagacaggatatcatctgttcatagttcttatcttccaccgctgaaaatacgatcactggcctggcagttttcccttcttccaacacccgcaccgtctctgcaaatgcctccacagcgccgggattgtgagccccgtcgatcgtcacatggggcgcggcttcttccatccgcccctgccactttacagaggcaagcgctttctgccatttctccctgctgacatgttgatccgaaaaaagatattctgccgcttccagcgcaagcactgcattcataacctgatagataccacacaccggcatcttccatgtaacatctttatcatacgcattcgacctgcaaaaagcaatagatttacgtccaacttccaggatttcgtacgcatttttcgagatttctctacagggtgcgttcttctcttctgccgtctttcgcagaatatttgaagcagcacggctgtttccgtcgaagatcagcggcacaccctccttgatgattcccgccttttccgccgcgatcttctcaattgtgtccccgaggatgtccgtatgatccagactgatggaggtgataacagtcagacacggatggccggcagaattcgtcgcatccagtcttccgccaagtccagtctcaagtatgatgtactccacatccgccgccgcaaatgctttcattgccattccgtacaggaactcaaaataggacggatgggcaatcccatctttcctcattccttccaccgcctccatgacctggcagaacacgccgagaaaggcttcatcgtccacaggcacattgtccacccgtatccgctcgtttatggatacaagatgaggggatgtaaagaaccctgtctttttcccctccgccatcagtatcgcctgtatatatgcacacaccgacccttttccgttcgtcccggccacatggatgatcttccggtcctctcccggattcccgagccttctaaggaattcacgggtatggtcaagtgtgtgcttttttgtaaatttcggtaattcttctatataagctgccgcctgttcataattcactgtgctcacccttattcttctgaactgtctttctgctctgtccaggatttctccgggtctgttccagtcccttccctcaccgtcagtgtaccgctctggtatacatattcgttggaagtgcggaacgtcgtgttgctggaacccatctgcacaactgtgataacgtctccgtcttccggcactgtctcgggcagatcgatacgggtattgttcagaaatgtactcttttgcttctccccgtttatgaatatcttgctgtgcctcgtaaagttttcaccgtacagactgcagccttcgttcagatgcttcactacatttgtcagcgtgacatctttaacgcccatctgcatatgcccctctgtgatcggctccttcccgttataaacgtattgcttgccatacaagatatcatactgcagaagttccaggtcagacaggtagttctttgtctttctccgttcctggtgatagttgaacaccgtaccggaatggatatcaagacggtcaaatacatccgccatgatctgataggacggtatgttgcggtcttctttctgaagtccgatattgtcccagatcacatagttcgtattgtacagataccggcttttcaggtcctcggctttcagccccatagtcggcaggtggtcgccgtaaaatacaactaccgtcggctctcctctttcctcaagcgttttcacaaggtcgccggcaaatttgtccatctcatagacctggttcacatagtattcccatttattcttcaggccctcgtcctcaatgccctccactttaatcttcgggttatctatgatctgctcctccggataatctccgtgtccctgcacgctgacaccaaatacaaaatccctctgctccgtcgtattcatggcgtcgataatatgctggatgagaatatcatcctttgcccagccattctctgttgtctgaagtatattcatgaattccttgctcgtaaagctgtcaaatccaatgttgttaaatacatttgcccggctgtagaaatttcccccgttgttgtgcagggcatgcgccccataaccgagggcggccagcgctgtggcggcgctctcagctgtctggttcttcagcacggtcttgtacggatactctcccggtccaaaatacctgagattcatacctgtcagcacttcaaactctgtgtttgcagttccggcaccaacggaaggtaccttgaagtaaccggatgaatatttcttatacatctcatgaaggtttggactggcatcctcggaagtggtgaaaaattctgcctccgccacatcaaaataagattccagctggataaaaattatgttcggaagttcatcctcggaacgcccggtctcatttttcgtgatctcgccgttgttgctgattttctctattgttttcttattatagtcattaggttccgtgatgcctgtattgaacacgctggccataaagcagtatggaaggccgtaatcttcgtatgcaaacgctatatttccaaagtaggtggacacgactcttttctctaccgcaagattggaaaagagcccatatgccgcgaagcatacaattataccgagcaatgcccacacatggtgtacctttccttcaaactggccgccgcgcttccacatggacacgacccatatgacgaccgacacgataccgatggcaagaacaataagttcaaatccgttaaagtaattgttgataagactcagaccgtcctttgccaccttcaaatcctgcgcgttgaacggcgtgactctcttgagcagcatatatccgttcgctacaccgaggatcagccagaatacgctgatcaagatcctgacaaatactcttctcctgaacagatatacaatggaaaatgtaatgaatatcataaatgcattgtacaaaaataccatcggcgtgcctgtcatataatccaatgcttcaaacagcgaatgccttgatatggcctcgatcacaatgttgagcacacaggcaagaagcgcgtggaacaggagagaaaaccggttcataaacttatacaccggcttcatcttcctcgcaaaagcactgttgcgccgctgttctatgatcatggcacgccgttcctttctcgccttccagtatgccttcacatcttccttattcatattttttaatttatgaaatgtacctttaatgtcaggtctcttaatctgaatcttcataatatccccttatgactgtctggacttaagtccttccagtctttcttttacctgttccagcatctgctgatattttacaagtttgcctttttcctcctgaacctttgcctccggcgccttgctcataaacttctcattattcagcattcctgtggcacgcgcaatttctttcgtaaggcgtacctcttcctttgtaagacgctctatttcctgttcaaaatctaccagctcgctgagcggcacataggcggtcgcgtccggcactacgacagagactgcgtcttccgcgataccgtctttgttatgctgaatgataaagtcgcttgcgcaggacattcttataatagaatccttgagcatgtcaaggccgtggcacagcttcttatcctcgctcacaacgtagatctttgttttccttgccgcaggcacattcatctccgcacggatgttccgcacgccggaaatgaccgctttcagatgttctgctacatcctctgcctccggatagttcctgtcttcccggtacttcggccatgcagacatcataagtgactcttcctccggcacaagcttgccatagatctcttctgatacgaaaggcataaacggatgaagaagcttaagcgcgtctttcagcaccgttttcaatacccacagcgcagcattggctgattccggctcttcctctgcgcggtagattctctgcttcgcgatctcaatataccagtcgcagaattcatcccagatgaaatcatataccttctgaagcgcaataccgagttcaaatttatccatattttccgtcatttcacggatcagacggttacatttggataagatccatctgtcgcctggcagaagttcagacgcctcaggctctgttatctctttcccttcaatattcatcaaaataaagcgggacgcgttccataccttgtttgcaaaattacggcttgcttccactctctcgttataaaaacgcatatcattgcccggcgcgttcccggtcacaagcgtcatacgcagagcgtccgctccatactgttcaatgatctccagcgggtcaatgccatttccaagtgatttactcatcttacgtccgagagaatctctcacgagaccgtggataaatacagtgtggaacggtgattttccggtatgcgcgtatccggaaaataccatacgtatcacccagaagaagataatatcatatcctgtgacgagcacatcggtaggatagaagtaatccagatcttcattctgctttggccagccgagtgtagaaaacggccacagcgcagagctgaaccatgtatcaagcgtatcttcatcctgtgtaaaatgtgtgcatccgcagtgcgggcatgtctccggcatctgtctggccactacaaattcaccgcattcatcacagtaataagcaggaatcctgtgtccccaccaaatctgacgggaaatacaccagtctcgtatgttttccagccagtgcagatatattttgtcaaaacgctccggcacgaacttcaattcacctgtctttaccgcttctatggccggcttcgcaagctcttccatcttaacgaaccactgctgcttgatgagcggctccactgttgtatggcaccggtcatgtgttcctacattatgtgagtgaggaacgaccttcaccagatacccctgctcttcaagatctctgacgatgcgctttctggcctcataccgctccagacccgcatatgctccgccattttcattgatggtcgcgtcgtcattcatcacattgatctccggcagatcgtggcgctttccgacctcaaagtcattcgggtcgtgagccggcgtgatcttcacagcgccggtaccaaattctttgtccacataatagtcggcgacgatcggtatctctctgttcacaagcggaagaagcgccgtcttccctacaatgtctttgtaccgctcgtcgtccggatgtaccgcgatcgcagtatcgccgagcatcgtctccggccgggtagtcgctatctcaagaaagtcctctgttcccacgatcggatacttcacatgccagaaggaaccgtcctgttcctcatgttcaacctccgcatccgaaagagacgtcttgcagaccggacaccagttgatgattctggaacctttgtaaatatatccttcctcatacagcttgatgaacacttcttctaccgcctcggagcagccgtcatccattgtaaaccgttctctgtcccagtcgcatgacacgccaagcttcttaagctgtccttctattgtccccgcatattcttctttccactgccatgtacgctccaggaacttttcgcgtccaagttcttttttatctatcccttcttctttcagctggtttgtaactttaacttccgtcgaaatggccgcatggtctgtcccggggatccacagtgcattgtatccctgcatcctcttataccggatcaatatatcctgcagtgtattatcaagtgcatgtcccatatgaagcctgcctgtgatattcggcggcggcatcacggtcgtaaacggctttctgcttctgtctacttcagcatgaaaatacttgctctcacaccatttttcatataatttcggctcaatctctttcggattgtaagttgtttccagattctgactcatagtttcctcctcatactccttcgtaaatatttcacacttatttcacaaatcggggtataaaaaatcaccccttaccagcatgtaaagggcgaaataaaaatccgcggtaccaccttcattatatagaagaaacaacttccatatatctcatcatattctttaacgggaacgactccggggtggcctactcatctttcagccatccggctccaaagctaccttccgccactccttcttgaaaccaccttccagcctgtgaatggttctctcttgcaagggcagtgccgtactcttcttcttcaacgcctttatcttcataaactaatgaatatcatagccatccgggcccggtttgtcaaggtgtttaaggaattttcagaatatcttaaggagttaaaattaatggttttcatcactctgatcttgtgttataatcttgccatggggtattagcgcagttgggagcgcgccacactggcagtgtggaggccacgggttcaagtcccgtatactccatgtcgtgaaagatagttaaaaatccgcaatccctttaatatcaaggggctgcggattttttatatgtagaatatgctttccgtttaagatccatgaatcatacaaatgcaacgtcaaataatattttacatacacaagacggctcttcgccaaatatttcaatatcgtacgtgatcgttttaccactggaacttacgctgttaataattgcccacgtctttttatctgagccagaggagcacttgacattaacatataatatctttgcaacactcaacttatcagataaggtaaaacttgccgatactgtccttccgctcccggcatttgttgtgctccagttatggcatgccagaaaatgtttcgtgctgtttctcgcatctatgcattcaaatttgttgtttaatatctccccctgacgggcatccaacgcatagccctcttccgtcgtctcaaggttgttcgcgatatttaccggaccggacggtccctgatctcctttatctccctttggtccctggattccctgcgggccctgtgggccagctgcgccggtatctcctttatcaccttttggtccttgtacgccggatgctcctgggtcgccttttggtcctgtcgcgccggttggtccctgcgggccggcagcaccggtatcacctttcgggccagttgccccctgcggacctgtcgcgcctgtcggcccttgaggccctgtcaatccctgtgggccggtcagtccctgaggacccgttgcgccggtcgcaccctgagggcccatcggaccagcctctcctctgtcacccttatcgcctttcggacccgttgccgatacacctgtgtctgtgtcaccaatgtaccaattgccgttggcaccgatatgtggtgtgataccgtcgtcacctcttgctttgacccctgtatcataattgttaataaaccagttgccattttcaccaatataaatttccggtatgaagcttgatttttcttccattcttttgtcctcctttttatttgataactgtatcttatcagcaactacaaggacaaagagggacacgtataaactttatttcggttccttatatgtaagcatatataagagcctgccggcgctcttcccattgttttgcggctgtatggttatgccggtaaggaattaagcttaaggaaaagaacaatacacttattgatttacaccgcgctatataccagatctttgggcaacaggcgcacaaactgctcaaacaggggattagaagtcatcatcgactataacaaataaaaatggtgcaaaagtaacaatgacttgcaatgctcatgttccagaaagaattctgctccgagaattatagatttcaccgtatactaaataaaaatccgcagccttttgcagatgataagacggcggatttttatacagactatattttattttttacttatttccaacgcccgatggcctgccatgatacttttactgctatcgcagatgtcacaataacagatacggtcacggaatcagaagttcttatcgaatttcccatattgtcatattcaccatattttgtcacgacagttccgttattacctactgtcataataaatgaatactcgctgtctacaaagcttttcgggaaagtgatgacattcttgcataatccattcccgccggatgttctatacgtaccataacaaatttgtgtcccgtcaggatatcggatatatccagtaccagagttgttgttcatttcattgatctttgcgtccagagctttcccctgccgtgcatccagcgcatatccctcttctgtcgtgtcaagattgttcgcgatatttaccgggccggccggtccctgatctcctttatctccctttggtccctggattccctgcggaccctgtgggccagctgcgccggtatctcctttatcaccttttggtccttgtacgccggctgctcccgggtcgccttttggtcctgtcgcgccggttggtccctgcggtccggcagcaccggtatcacctttcgggccagttgctccctgcggaccagtcgcgcctgtcggcccttgaggccctgtcagtccctgtgggccggtcagtccctgaggacccgttgcgccggtcgcaccctgagggcccatcggaccagcctctcctctgtcacccttatcgcctttcggacccgttgccgatacacctgtgtctgtgtcaccaatgtaccaattgccgttggcaccgatatgcggtgtgataccgtcgtcacctcttgctttgacccctgtatcataattgttaataaaccagttgccattttcaccgatataaatttccggtatgaagcttgtgttttcttccattcttttgttcctccctttgatttgataactgtatcttatcaatatctagagggacaaagagggacatgccgatagttttttcagttcgttcatcacggacacacaaccggaagaatatttaccgcctgcagagctgcttctgcattgatacattccttatccgctgcttccttcttccatacagactttagagcatttccagtgactttaagatatataaccagccggtcagcgtaaacgcactcaaaaatgttgtcagcataataacgctggatgacaatacgccctcatgccccatattctttgccataacaaaacagctgaccgtcgtagcagaaccgagcatgaccagtattgcaaccagtttctcttcccggaagcccatctgtatggcgacaggcagaaacagactgcaaaatcctatcagcttcaatgcagctgcggtaagcgaaggcttcactttggcgaaagccttctttatatcaaaggaggctcccatagcaatgagccccatcggcgttgccatccccgcaacatttgaaaccgttttttccacaacatgaggcatcgggatcttgagcacagaccacataagacctgcggctataccgatgatgatcggatttgttatgatcccccgcagtgtctgcctccacaccgtgccatttaactttccccgctcgggactgaacgcagaaagcattgcgactgccatgacattatataatggtacgctgccgatgatcataagcggggccatccctgccgtcccatatatattttgaataaaagctattccaagaagtgcagcgctgctccggtaagaagactgtataaattctccctgtatagacctgtctctccacaaaaaagaaactgccatagagatggcgatactgacaaccgttgccagaagacagaataatacaaaccgcacatcccatacctgccggaaatccactgtggcaaggtcattaaaaacaagtaccggcagaggaacaagaaacacaaaccggttcatcttcgccgcgaaatcatcatcgatccatcctatatatttgagaaacagtcccagaagcattagcaaaaataccggaacggtagcatttagactaaaaaccaagttatccataatatctccctgctggggttggttggggacgggggatttttaaaaatcccccgtccccaacccgtttttaccctgtccctttttactgaaataattttttgtaaatatgataatcttcatttttatacacatttataacgatacgttccacttcggatgtggataagtatttatcgatcacttgtactgcaatttctgctgccagtttattcgggaaatgaaattctcctgttgaaatacagcagaatgcgattgaccttaagccttgtttttctgccagcttcagacagcttttatagcatgactttaactgctccttttgttcctctgtcacctgcacgccgactatcggtccgactgtatgtatcacatgttctgccggtaggttatatccgcccgtgatctttgcttttcctgtcggctcttcatgcccctgctcttccatgatctgtgcacattcattgcgaagctgaagacctgccgccgagtgaatcgcattatctatgcatccgtggcatgggacaaagcaccccatcatctgcggattggcggcattgacgatggtgtctgctttcagcctcgtaatatccccctgccagagaacgatacggcgggaatttttaatctctgtacacggatattcgtcctggatcacaggaagttccataacatctacaatccctttttcttccagctcttcccgaagcagttcgtcctgcactttcaatatttccggagataccggccccggaaagcggacattcatcagacttctcaaaagccttcttttcccgggtaaatcaaccggcatggaaagcgcttcgtaccctgcattttctgctctgagccgatctatcagatactctgttttttcttctttattcatatggcacctctcattatcttatccgtcataaatactgtttgataactgaatatgcttcatacagttcctcatatgtcattctgcagtttgccgggcttgtggacggcaaagtaaccgcactgatcccattctttggaagacaatattttttatacagctgtcctgcctttgttcctgtagtgaacactgcctgtatctttgcatgtttcaatatcacatccagatcatttgccacgggattccggatactgctgtcatccgcgcccttgatctcacagccggccagcacgtcccacactgcaattttatattccagtgcaaatgctgtcttctcttccggcgtctgcggaagcggcgcctggcacacatcagacactactttccagaaacggttccgcggatgtccgtagtaaaaaccgacctccctcgatttaggggacggcatggtcccgagcattaatatgcgggaatgttcattatatataggctgaaagttatgaacaatatattccgtctgcatctttatttctcctgtctgcataatcattcatactatacagcatcagacgggaagcgtcaaatgccggcgtttattttcgtgaaaacttaaacttttattgagtaaatttattcattatgctatactttctttaaacgtactaatcacaaaggaacatcctgagtgaaaaggcgcacggaaagttcaacaaataaagggaatactatacccttatggaaatctgcgccgtctggcgcagatttttttagttcatacataattcttccggaggtgatatatgaaagagctcattgataaactgaaggaaaaccggacattatcaaaacgggaatgggtggcgctgatcgaaggtcgttctcctgccctggctgattatctgtatgatgcggcacgcagtgtgcggcacaggcattacgggcatgacgtgtatgtccgtggactgatcgaatttactaattattgcagaaacgactgcctttactgtggtatacggaaaagtaactctaatgtgtcccgttaccgcctgacagaggaacagatactatcatgctgtgataccggctaccaattaggattccgtacatttgtgctccagggcggagaggacggctgttacgacgactccaggctgggcagtatcatatctggcataaaaacacgctggccggactgtgcgctcacgctgtccatcggcgaacgaagctatgacagctatcagtatctctacgatgcaggcgcggaccgttatctccttcggcacgagacgtttaatgccgggcactatgcaagactccatccgccactgctgaaagcagaagttcgccaggaatgcctctggaacctgaaaaagattggctatcaggtgggaaccggctttatggtaggctccccttaccagaccgcagaacacctcgcagaagatatgctttttataaagaaactggatccgcagatgatcggtatcggcccttttatctcacaccatgacacgccatttgccggacacccttccggcacactggaacttacgttatttatgcttggccttctgagacttatgataccaaaggtgctgcttccggccaccaccgccctcggaacgatccacccaaaggggcgggaactcggtattctggccggtgcaaatgtcgtgatgccgaatctttcgccaaccacggtccgaaaagattatgcgctctatgataataaaatctgtaccggggatgaggccgcagaatgcaggaactgtctggaacgccggatggaatctatcggatatcacgtagttaccgcacgtggtgactcactgaatatataaaccaaaaaatattataaaattatggaggaaatgtactatgtatgatgtcaattctaaacacgcggacgactttatcaatcatgacgagattcaggcaactctcgattatgcagacgagaacaaaaacaatctggaattaatcgaatcactcattgaaaaggcaaaactgcggaaagggcttactcaccgggaagcttctgttctgctcgcctgtgaagacgcggatatgaatgaaaagatattccgtctggctgaacagatcaaaaaagatttttacggaaaccgtatcgtactctttgccccgctttatctctccaactactgtattaacggatgtacatactgcccttaccacatgaagaacaaacatattgcccgcaagaagctgtcccaggatgagatccgcaaagaagtcatcgccctccaggacatgggacataagcgtcttgcccttgaagcaggagaagacccggtacataacacgatggagtattatctggactgtattaacacgatttacagcatcaaacataaaaacggggcgatccggagagtaaacatcaatattgccgcgactacggtggacaattaccggctgttaaaagaggccggaatcggcacgtatattctcttccaggagacttatcacaaagagagttacctgcagctgcatcctacgggaccaaagcacgattataactatcacacagaggcgatggaccgggcgatggaaggcggcattgatgacgtaggtgtcggtgtactgttcggacttgacaagttccgctatgaatttgcaggcctgctcatgcatgcagaacatctggaagctgcatttggtgtgggacctcataccatcagcgtaccccgcctgagaaacgcagacgatattgacgccgattcatttacaaacggaattgatgacgatacctttgccaaaatcgttgcatgtatccgtatcgcagtaccatacaccggcatgatcatatctacacgtgaaagccagaaaacgcgggagcgggtactgcatctcgggatatctcagatcagcggcggctcacggacaagtgtgggcggttactgcgagccggagccagaagatgaaaaatcagaacaatttgacgtcatagacaaccgtacgctggacgaagtcgtacgctggcttatggaaatggattaccttccaagcttctgtactgcctgttaccgggaaggccgcaccggcgaccggttcatgtcactgtgcaagagcggacagatacaaaactgctgccatccgaacgccctgatgacactggaagaatatcttatggattatgcttcacctgagacaaaagcaatcggagataaattgatagacaaagaagtattaaatgtaccaaacgagaaagcacggcaagttgtgctcgaaaatcttcgcctcatccgcgaaaacaaccggcgggatttccggttctgactctaattggggacggggtttttctagaaaacctccgtccccaattaaaatatccctgtccctttttcaatttaccatgtccctgacggaaaggaatcatatatgagcttaaacagcaccccttcttccgaacgcatccatattggtatcttcggaaaacgcaacgcaggtaaatcaagtgttatcaatgcccttacgggtcaggatctggctattgtatctgacataaaaggtactaccacagaccctgtattaaaggcaatggaacttcttcccctcggcccggtcgtcatgatagatactccagggctcgacgatgaaggcgaactgggaaccctccgagttcaaaaggcttatcagatactaaacaaaacagatattgcagtgcttgtagtagacggaactgtcggtatgacagaggcagatcatgctattttaaaacggatcaaagaaaaaaagctgccttctgtcgtcgtactcaacaaggcagatattgccgttcccgacaggtacaaggacgctgcatcgcttggacttgcgccggacgattattttatgtgggtgagcgcatcagataacagcaatatatacgaattgaaagagttgatcgcaagactcgtgcctgctgatgatcccaaatccaagatcgtcggcggccttatcaggccttctgactttataattctcgttgtgcctatagacaaggcagctccaaagggacgtctcatactgccccagcagcagacaatacgcgatatattagaggccgatgcagctgcgatcgttattaaagaaaacgaattgtccaatacactcatgactctcggcaaaaaaccggcaatagtcattactgacagtcaggtatttgacaaagtatcaaaagagacaccagccgatataccacttacctcattctcgatcttgtttgcaagatataagggtaatttaagtacagtagttgacggggcaaggactttggactgtctgaaagacggagatacggttctcatcgcagaggggtgcacacatcacagacagtgcgacgatatcggtaccgtaaagcttccccggctgattcacaaatacacaggtaaacaaataaactttgaatttacgagcggcacagaatttccacttgacttatccacatacaacctgattatccactgcggaggctgcactttgaatgaacgtgaaatgaaatatcgtctgaaatgtgctgaagacgccgggataccgataacgaattacggcatagcgattgcgcaaatgaacggaattctggaacgaagcatagaactatttcctgaattttgaaaaagggacacctttattttaattggggacggaggaaaacgaaaaaacctccgtccccaatatcttcattaaatctaaaatttacactataattctttataaattcttcagaattgctacaatacatctttatttctttccgttagaattatcatatcaaaataaaatgttatctaatccgagggggattccgatatgaatactacggcaaagaaaattgaaaatacagtgttgtcactccatccattttcagaattaaattatgaacgctcatattccattgattctttaatcttgatgttttttgcattctcaggcataggctggatctgggaagtaattttacatataattgaagacggtatgatcataaaccggggcgttatgacaggcccatggcttcctatttatggaatgggaggagtcttaattctagttgtcctgaaaaaattcagagcccggcctatgcagctgttcggaacgatcatgtgcttatgtggagtgatcgaatatgttacaagtatcgcgctggaatctttattcggcgccagatggtgggattacagcgatatgcttctcagcatagacggccgtgtgtgcctggaagggcttatgatatttggaatcggcggacttttctttatatatattattgcgccgaaaatggacgacctgctgatgcggttttcttcaaagtctaaaataatcgtatgtgtgtttttacttgctgtatttctcggagatcttgtacacatgtttattgctcctaacatgggcttcggaataacttcttaaaaagggacagggtaaatgcaggttggggacggaggttttaaaaaaaacctccgtccccaacctgcatttgctataacccccgtttccacaatttgtggatcaagtattctttagcatctttacagtcatttatttgtatcgtattatttccgattatataacctaccgtctcctgccattcttttaagtcgtattcgttttcgtctatggactcgatggctgccagcactttttcactgtagataggcaaaattacatctgacaggtaattgcatccggctttggatgctatcactgccagcagctcttccttcgtattctttttcatctttcaatcccttcctatgcctcgccgcaactgcatcccctcataattatgtggatataaaatcagacttttttatccatcaatgatactattattttagtaaatgctttttattaagtaggattcgttataaaatacatgcgattgcgttaatattttgtggaaaataaagtctacatttacatccaattttatatcgttttgtcccccagaaagatatcgttttctttcatgtagagctttatccattttgaaactgtcgtatggtttgtacccataatcttagcggctctgcgcatgcttatcttgccctgcctccaaagctcaaacacatggggaaactcttcaggtatttcctttgccggtcttccgaacgaaactccctttgactttgccaccgcaattccttctgcctgtctctgccttatgttttcccgttcaatctgggcaacgtacgataatatctgcaggacgatatctgcaataaacttaccggtaagtccgttcacctgattcctcgtgtccagcagcggaaaatctatcacaacgatatctacatcttttgccttagtcagcaccctccactgttctataatttcatcgtaatttcttccgagccggtcgatcgacttcacaaacaccacgtctcccgcacacagtttgtcgatcattttctggtaattaggacggtcgaagtctttgcctgactgcttgtctatgaaaatgttttccggcggcaccggtatcttttccagcgccgcgatctgccgcccaatattctgttctttgcttgacactctgacatatccatagcattttttattcattattttctctccttctccgtatataatatcgtaaaagagagtattattaatttccaaatattaccatatgtaatgattttaaatagtcatattaatataataatactataataaaaaaaacccttgcccattatatatttctgcacaacagcacatcttacacaaggataactcaatttcacgatcaaaattctggtaagcactaagtaagttaaaaaagcgaagcgcctgccggcgctccgcaaattggttccgtgttaaattattccttatgcgtgcacttctatctgcccgagcacctctccgataggcgcagcgatagtcaagtcagcccctacctccttcgccgtagcactcttgttgatcacaacaagatgtctgccgctgaagtaatcgataaaaccggctgccgggtacacaataagagaagtgccgccgatgatcagcgtatcagcctcactgatcgcctgtacacttcttgatataactgttgaatccagactttcttcatatagcacaacatccggcttgatcagcccgccgcactcgcatttgggaacaccgccggcatgtttgacatacgaggcatcaaaaaactttccgcatttcctgcagtagtttctgtggatgcttccgtgcagctccagcacgttccggcttccggccgcctgatgcagcccgtcaatgttctgcgtcacaacagcagtcagctttccggccgcttcaagttccgccagcttcaaatgtgccgggttcggctctgcgtccaggaacatcatcttctcccggtaaaattcatagaagtcctctgtgttcttcacaaaaaagctgtggcttacgatctgttccggggaatatttatatttctgcctgtacagtccgtccgcgcttctgaaatccggtatattactctccgttgacacacctgctcctccgaaaaacacgatccggctgctttcatcaataatatcctggagcttctttactgcctcgtccattctgttaacctcccatccatttgccatgcagatcatacgatccaccggatgtatgatctggacatatatgtttgttcccgctgcaattctattataacgcaaaaaaaccgtactgcaattgattaattacagcacggtctctttttccgctgtttatctctccctttttctgttcacttcctttatccagccaatcacatcaagaaggctgcccatacgcccggttatcccatccaggacttctgcgggcacatcggtctcatccgggatatagatgatataaccgcccgcagccttaccggccagaacgccggcggtactgtcctccagaacaaggcactccttagggctgcacccgagttcttcggctgccttccagaatatgtccggctccggtttgctcttttccaccgcgtcaccgcagacacagacagacagatattcataagctcccgcgcgccggataatgttttcggcacgtgcgcgggcagtcgacgtggcgaccgccatcgggatcttttcctctctcagatagtccatcagctcaaacaaaccctttttgatcggtattccgtctttttcagtaagcatttcaaaaaacgcatgctttacttcctttacatgatcataatccacatccggcccaagcgcctcatgaaataactttcttatctgggccgggttcccgccacgaaagctttcaataagcctgtcattgatatccagcttcagtttctccccggtcatctgccatgttacggtagataaatgctctgtgtcgaacatcgtaccgtccatatcaaaaattacgccttttaccattttgctctctcctgcccatctcccgatgattctgctgctttaacgccccttctgccttaagatcccttctgccttagcgtctcttctgccttaacgctccttctgccttaacgctccttctgccctaacgccgcctctgtctggcgctgccgcagtctccgccgccttaaccttccctgccttccgcctgactgtcccggcgctggctgtaaccacagaaaaattcgtccagcgcatccagcgtcttcacaagaacagggatctcgtcttcaccaagcttgtcgagtatggcctgtgtcatctgacggtggtaatcttcgtgatgccggtatgcaccgacgcccttatccgtcagctttacatacacgacccttctgtcttcctcacttcttctgcgctccacgtattttttattcacaagactgttcatggctgtcgtgagagaacccaccgtgatgccgagctttcgggctatggcggacatattatttccttccccgaggccgaccgcctctatcacatgcatgtcattgttcgtcaggtccttaaactcttccgtaatgatcgccttttcttccagctcccatatttcattgatcaagtttacaagaatatggttaattgtcttataagcgttttccatcttacgctccctctttgaataccatcaacatttacctgcttaatattataccctctcaggcagaagagaagcaatcacttcttttacggtttctatccgatctgctttatatgcgttggcgccgcagaataaaagggcatcctccacctctcctttggccgcatggacgagcgcatctgtaatgcagtacgggatctcatccggtctgcatttgtgaaggcagccatggcacggactgtgcgggatctgctcccctgacatcacccgttccataaatgcattctttatcgctcttcccggcattcccacgggacttttcactatgacaacatcttcccgctctgccttcagatatgcctctttatagcggatatctgcgtcacactcttctgtggtgacaaatctgcttgctacctgtaccgcgtctgcgccgagggaaaatgcatgcgcagcctgtgctgcagtctctatccctcctgcgacagcaaccggtatcttcctgccatatttatgctcatatttttttaccgtatccaagatcttcaaaatctcggcatcgtaagcctcgctgtcatacatctcaagctgctccttcgtgaagccgaggtggccgccggcctgcggcccttctatgacaagcaggtccgggacgcgggcatatttcctgtcccaatactttaagatgacctgagcggatttgtccgtagaaacgatgggggccagttttatctctgcgtcaccggcgatcttcggaagctccgtcggcaggccggcgccggatatgatcaagtccgctcccgcctctatcgccgcgcgcacataggcatcatagtgacgcatcgccaccatgatattaaatccgatcacaccctccggcgcgatctggcgcgctttctcgtactccttcttcattgcccttaagttggcttccagcgtgttcctgtcaaaatcagcttcccggaagccgatctgagcggcagatatgataccgacgccgccttcctttgccacagctgcggccagaccgcccagactgatcccgacgcccatgccgccctgtatgaccggcagctctgctttgatattccccatgatcaacggtgctgttttcatatgacctctcctacattctgcggaaacgcatgtacctgtgctccgtcagttcttcctccgacatctgcccgtacgttccgagaaatctctccatatatttcttaagctttgacgtaacctctttcatattctggactgtatagtggcccggctctttcacgatccgttccacaatacgtgcctgaagcagatcgcctgccgtgagcttcatcacttccgccgcttcttttgcccgcgtgctgtccttccagagaatactggcaaatccttccggcgacaagatagagtacactgagttttccagcatccacacctcatctgaagtagccatggcgagcgctcctccgcttccgccttctccgatgatgatcgataatacggggactctaagggcggacatttcatatatgcttctggcgatcgcctcgccctgtccccgctcctccgcttccaggccgcagaatgcccccggcgtatctacaaaacagatgaccgggcggccaaacttctccgcctgcttcatgagccgcagcgctttccggtacccgtccggagacggcatgccgaaattacgctcaatattttcctttgtgttcgtccctttcgcctgagcgataacggtcaccgggcggccattaaatcttccaactccacctatgaccgctttgtcgtctgcaaagcacctgtctccgtgaaattcgataaagtctgtaaacatggcctgaatatagtcttcaccgaccggtcggtctttcatccgtgacagttccaccctgtcccaggccgacgccaccttgttgtgctgcgccgtacttacttccgccccggcagtatcgtccgcacagctttcagctgtttcagtcccggccgcatgaagctttaatatgcgtgaaagcgtgtctttcatctgcggacgctctacaatgccgtcgatgaagccgtgttcaagaagaaactccgaacgctggaatcctttcggcagcttctgcccgatcgtctgctctatgaccctgggtcctgcaaatccgatcagcgcgcccggctctgccagtataatatcgcccagcatggcaaagcttgccgtcacgccgccggtcgtcgggtcggtcagcacactgatgtacagaccgcccgcatcgctgtgccttttcagcgcagccgacgtcttggccatctgcatcagggacgtgatcccctcctgcatcctggctccgcccgaacaggcaaatataataaccggcagcttctccttcgtggcgcgttccaccgctcttgctatcttctctccgacaacctctcccatactcgccatgagaaaacggccgtcgcacacgccgatcaccgtctctgtgccgtcgatgcacgctttgccggtgaccacagcctcctcgagtcctgtcttctccttaagctgatccagtttctcttcataccctttgtagtccagcggatttctcgttgtaagtcccctgtcccattcttcaaatgtaccttcgtcggcagtcatctctatcctgcggtatgcgtgtacacggaaataaccgccgcatttcggacaaatgtagctgcctgcctttacatcttcggtaatgatcgccccgccgcatttattacattttctcaaaagtccctgcggcacttccggcctggcttctttcagagaaatataactcttgcggctggaagaaagccttgtcttcttgaacatattttctaatttcataggagctcacctttacattttctcgataaattcaatatctatattgcctgcctgataatccgggtggcttaaaatatcatactggtagtctacgttcgtatcaattccctcgatgatcacttcaccgagagcgctctgcatcttgcgtatggcctcttttctgttcttggcccacacgatgagctttgccaccatggagtcataatacggcggaatcgtgtatccgctgtagatcgcagaatcgatccggatgcctttgccgcccgggagatacatatctgtgatcgtgccgggtgacggccggaagcctttggaaggattttctgcattgatcctgcactcgatcgcatggcctgtaagctgtatctcatcctgtgtgtaagaaagcggcctgccggacgcaatgcggatctgctctttgatcaggtcaatgcctgtgacccactcggtcaccggatgctccacctggatccgcgtattcatttccataaaataaaagttcccgcttttctccagcagaaattcgatggtccctgcattgacatatccggccgccttcgccgctttcactgccgcgtcgcccatcttcttcctgagcccgtcgtccagcgccacagaaggcgattcctcgatcatcttctggtgattccgctgaatcgaacagtcgcgctccccgagatggatcacatgaccctggctgtccgccagtatctggaactctatgtgccttggctgctgtacaaagtgttcaatatacattgtattgtcgccaaacgccatctgggtctccttctgggccgtctggaacgcctgtaaaaagtccgccggcgtctccgccacacgcatccctttgccgcctccgccgagcgccgcctttacaatgaccggataaccgatctcatctgctgccgcggccccggtttccgcgtcgaatatgggttccgtgctgcccggtatcaccggaacgcccgccgccgtcatcgtatttctcgcctcctgcttgttgccaagccgggcgatcactttggaatccggacctatgaatatgatactgcactgttcacacagttcagcgaacttactgttttcagacaaaaagccaaatcccggatggatcgcgtccgcgcctgtgatgatcgtcgcacttatgatccggtccatgctcagatagctgtcgctggaaggcgcgggaccgatacagacagcctcatcggcaagctgggtgtgaagggcatccttatccgcctctgaatataccgccaccgtctcaattcccatttcccggcatgcacggataatacgcaccgcgatctcaccgcggttggcaatcaatattttcttaatcatgtaactcacctatccaatcataaatgtcagttctgcgcttaccactgttttgccgtccacggaagctgtcgcttctccaacgccgacaggacctttctgcttgatgatcttcgtctccaggcgtaccttgtccccgggaacgatcttccctttgaacttgcatttgttgatcccgccgaagtatgcgatcttccctttgcactcctcctggctcaaaatagccacagcgcctacctgcgcaagcgcctccacggtaaggactccgggcatcacaggctcctgcggaaaatgtccggcaaaaaaatcctctctgtaagtgacgcatttatagccgaccgcgtactgccccggctcataatcctcgatatagtcaaccagaagaaacggatgacggtgaggaatgatctccttgatctgactgatgtccaaatgattcatatttcctccttcagaacgtgattaacagatacggaacaacggctggccatattctaccggctggccgttttctgccaggatttccgtaacggtaccgtcataatcgctctctatctcattcattaatttcattgcttccactatcgccagcgtctggccctttttcacggtatctccgacgcttacaaacgccggagactcctctgacggcgcggtatagaatgttcctacaagaggagattccacgatactgccgtccgctttttccggcatcttggcctctttctgcgccggggcaccccaaagtgctccgcctgcgctgtctgctgcggccgtcccggttacagcggcaggttctgccgttaccacctgtactttatcctgctttttggtgaggtgcagccgcaccccgttttcttcgtattttaatccggtcagttctgactctgatacggcttctataagtgataagagattttcaaattccatgatcttcaagtcctttctaaccttcgtatttcctgactaataaggttgcattgtgcccgccgaacccgagggaattcgtgaggacatatgtgagatctttttctaccggcgcaccgaccgcatagttcaggccgcagttctcatccacattctctgtgccaactgtctgatggatatatccgtactgtatggatttgacacaggtgataaattccacacctccggccgctccgagaagatgcccgatcatagattttgtggaattgaccacgacatcttttgccgcatctccaagcgccagctcaatcgccctcgtctcaaagagatcgttgtgatgtgtgctcgttccgtgtgcattgatatagtctacctgcgccggttcgatcccgccttcttccattgcaaggctcatcgcctttgcagcgccgcttccgtcctctgccggagatgtgatatgataggcgtctccagtggagccgtagcccacaacttcagcatatatgtctgccccgcgtctctttgcatgctccagttcctccagcatgacgacgccggccccttctccgagaacaaagccgtctctgtccctgtcaaatggtatggacgcccgcttcgggtctgtggacgtagagagggcagtcagactcgtgaatcccgcgacacctgtaggacagatgcagctctcggtcccgcctgcgatcatcatatcggcgtcaccgtactggatcgcccggtaggcatctccgatacagttggtccctgaggcgcacgcagtcactacattcgtgcattttcctttgaaaccaagctgtatggaaatatttccagccgccatgttggatatcataagcgggaccataagcggattcacccgtccgggtcccttttctctgatctttgtatgttcctgctcgacccgctgcaggctgcctatgcctgaacctacgatcacgcccgcccggtagggatcttctttttctatatcaagccccgaatctttatatgcctccagagcggcggctaccgcatactgggagaataactccatccgcttggcagctttaaaatccatgtattcttttgcagagaagtccttcacctccgcagcaagctttactttatattctgttgtatcaaatttcgttatctcaccgatccctacttttgattccttgacaccggaccagaattcttccaccgaattgcctatcggcgtcactgctcccagtcctgtaaccacaactcttttcttcatatcgactgtctccctctatcatttcacttatgttacattaccatgccgccgtccacatgaatgacctgtccggtgatatatccggccgcctctgacgcgagaaatgccgccagtaccgcaacctcctctgctttgccgaatcgtgcgagcggtatctgggacacagtcgcttcttttaccttttccggcagggcgtctgtcatatctgtctcgataaagccaggcgctatggcattgactgtgattccccgggacgccagctcttttgccgcggcttttgtaaggccgataactccggctttggaagacgcatagttggcctggcccgcattgcccgcgacacctacgacagaagacagattgatgattcttccgctcttttgcttcagcatctgccgggaggcaaagcggatcgtattgaacgcgccctttaaattgacatcgatcacttgatcaaaatcttcttccgccatcttcatcagcagtccgtctttcgtaatgccggcgttattcacaagaatgtccagactgccgaactgctttacgattccctggatcagttcttcgcattttgcaaaatctgacacattgcactggtatatctctgccctgccgcctttgctttcgatctcctgctttaagtccattgccttatcccgggagccgttatagttgatcactaccgtcgcccctccgtcggcaagcgcaagcgcgatcgcccttcctatgccgcgggaacctcctgtcacaagtgctacttttccttccatgccgtctctccttctatctcactgatcactttttctatatcagaccactctgcgatgttgtataccttgacatcccggtttatttttctcataaatccggccagtgtcctgcccggtccgatctcaataaaggtatccactttgtccgccgtcatggtctccacgcactgctgccaccgcaccggcatgctcacctgcctggccagcaatgcttttgtatctgctatatccgccaccttttctgcggttacgttcgtcacatacggtatcctaagtttggatagctccaccgcttcaagttcctctgcaagcctgtttcctgcgtctctgagcatcggagagtgaaatggtccgcttacattaagcgcgaccgctctctttgcccccgcctcttttaacgctgcgcatgcagcttccactgcttttgtctcaccggtgatcacgatctgccccggacaattgtagttggctatcgtaacgttgtccatgccgtcgagcacgtgttcaatagcttcccctgtcataccgaggatggccgccatagctccttcgcctgccggcacggtattctgcatcagtatgccgcgctttcgcacaagacggaccgcatctataacgtccatccctcctgccgcggcgatggcgcaatactccccgagactgaggcctgccgttacagacggggtcagattcccgctgccgtacgtgtggcctgcgccttctgtcacatccttcaatgcctccgtgatcgcaagacacgtcgtcacgagtgccgcctgtgtatattctgtcagatcaagtttttcattttcctcaaagcacaacgccttcatgtctaatccaagcgcgtcggatgctctgtcgtatatgtcccgggcgacagggctcttttcatagaaatcagcccccattccggccttctgcgcaccctgtcccggatagataaatgcaatcttactcataaacctctgctccttttataagcgcgtctgtctcacttaccagcttctggatcagctctttgcaggacattctctctttcaccataccggcgatctgccccgccatgacgcttccgtttttcacatcaccgtccaccactgctttcctcagtccgccgagcgtaagatgctccagttcttcaaaacttgctccgctgttttcaagttcaatatatttcttcgtcatttcattgcgaagcgcacgcaccggatgtccggtcgttcttcctgtaactctggaatcaatatccttcgctttgatgattctttctttataattgtcatgtacaatggactcatctgtcaccacaaaatgtgtccccatctgtattccctgtgctccgagcataaatgccgcggccgcgcctcttccgtccgcgatgccgcctgccgctatgacagggatattcaccgcgtccacgatctgcggcacgagcaccatagtcgtattctcaccgatatgcccgccggcctcacagccttctgccacgaccgcgtctgcgccgcagcgctccatccgttttgcaagggccacagaagcaaccacaggaatcaccttcactcctgcttctttccacattttcatgtatttctcaggattgcccgctccggtcgtgacaaccttcacgccttcttctacgatcacttttgccacctcgtccgcatacggactcataagcatgatatttaccccaaacggtttatctgtcagcttttttgcctctctgacctggtctctcacccagtcagcgggagcgcttgccgcaccgataagtcccagtccgccggcctcggatacacctgccgccagatggtactctgcgacccatgccatgcctccctgaatgatcggatattcaattcccaataacctggttacttctgtcttcatactgccaacctcgctttttcgttctgattatttgtgtgcttctacgtatttgataacatctgcgaccgtcacgatctgctctaagtcttctgtcggtatctctacgccgaattcttcttccagtgccatcactaactcaaataagtcaagagaatctgcgcccaggtcatccttgaaggaagatgcctctgtgatcgtgctctcctctacgcctaaattgtctgctaccattgatttaatcttttctaacattgtcattctccttttactcatattatttttctttttcatctatagcttcaccccgggatcatgccattggcttcccgtgtgtaactaactaccattccagcatagaagccccccaggataacccggcgccaaaccctgcaagaacaattttctggccttttttcaaagcgccgctccggttcagctcatccagcagtatggggatactggcggaagaggtgtttccgtactcctgcaggttcatgggaaatttctcgaccggttcgccaagcctctttgccactgcctctacgatcctgcggtttgcctggtgcagaatgtagcagcttatatcgcccggggcaacgctgtttgcctcaagtacctccccgatcacttccggcacacggcgcacggcaaacttaaataccgcctgaccgtccatcttcatgtatgtattctcctccggaatctctttccagttctttgtgtatctgctctcacatataagcgcgtctccctttgctccgtcggaatgggtcaccggcctataaatctgaccttccgaagccttaagcaccgccgcgcctgctccgtcgccgaaaaggatacaagtcccgcggtctttccagtttgttatattagataatgtctcgctgcctatgacgagtaccgtccggtacacgccggaggcgaggaaagccatggctgtgttgtatgcaaagacaaacccgctgcaggcggcgcctcccaggtcaaaccctgtggctttaaccgcgccaagttctttctgcacttcacaggccgcacagggcagaagcacgttggatgaaatggtagacacaagaatcagatccacttcctcaggtgcagtgccggcattggcaagcgctctgcgccctgcttccaccgccatggagaccgtcgtctcttcgccggcaatatgccgcctctcaacgcctgtccgttctctgatccattcatcgctcgtctctacaagctttgcaatatcattgttgtccattgtgtaagacggcgcatacgatcccgtcccgcatattgttcctgtcatatgattgtcctcttgaatttattcagacgatttcgtccgtggcaaatgatttgaatttaaattaatttgactttcaaagtatataggtaaaaaaagaaaatgtcaagtagtttgagtatcaaaatatttcgacatttattttacgtatatttcttcaaatgtacagccttgacaaaatgaatgccattctttatactaatcagcacatagcgtatctgtatctgaaacttatatataataacttctgattctgttattcccagtacaccaggaggcactttatgctcattattttatctgtaattttaattatatttactgtctgcattctctattgcatcacccactgttcaacttcatatgaccacaggatcgacgatgagcagcaggaacgttttctccgcgaaagaaagcagccccggtaactgttaccgggactatcttacctatcagcacttgtcagctgctccataaatcccttcttattttccactgctgtcgtagttggcctcccaaggtcctgcctggcgcctatagcgcttttcacttctatgtacgtcagtccgttccggacttttgcctcttttaatgccacgtccaattcttttagatttgctgcagataccacatatggataaccacaccctctggcgatctgtataaaatcaaggccacccgctgctgtcggcattcctcccacagtctcatgcgccccattattgatcataacatgcacgagattgccgggcgcattctgtccgataacggccattgctcccatatgcataagagacgcgccatctccatcgatacaccatattttctgttttggcctgtttaaagcaatgccaagcgcaattgaactgctgtgtcccatggaaccaaccgtcagaaaatcatattgatgcccctggccgttatcctcccgtatctcgaataattcacggcttgccttccccgttgtggaaataatagggtcctcgcccgatacttgaacaatatgccgtatgatctcctctcggtacagggtatgatcgttttgataccggattttcccgtcataagtaagcgcgcctttttgaatgacaaacgcgacacttttcccctcagcgagaattatctgaaaatcctccattatttcgcgcatctgcacttccgttatattctctgatattacacacgtccggatattcatatcctccagaagctttagtgtaacctcaccctgatagacatgctggggttcatcgtgtgtccccggctctccccgccatcccaccacgaatatgcagggaattgcatatactttgtcatgtaaaagtgaggcagccgggttgatgatattgcctataccgctgttctgcatatatactacgggcacgtttcccgtagccatgtgatacccggcagccaaagctgcacaattgccttcatttgcagctataatatgttttttggatataccgattgtgttcatcagataatcgcacaatggttttaacagcgagtctggaacaccggtaaaaaattctgccccaagattatttacaaatgattcaactttcatatttctctccttctttatatatgaagaatgttcctgtatatattttccagatccttttttgacaatgccaccggattgtttccaagccgctgtgcgtttacagagcctgccagcacatacagttcctcttctgcatcgggaaccggcgtttctaattccagttcagacagcagattttccacacttgttattccatcttcgatctcagcctctcctctgcccgtcaataaaacagccaactgctgaaatacgcctgaaagatattcccgtcccctcgggtcggacactgcttccatatgctgagtcataaatctccacacatgaggaaggcagagcgcggcagcatacccgtgaggcatcccgtagagggtcgtcagtttatagcacattgcatgggccgctgttgtcctcgttatgttgatcgcctgtcctgcaacattagccgcatacatcattcctgcgtttcctgaccctgtacctttcagataatctcttctgtgcagcctgaacagatcgagcgcttctaaagacaactttctgctctcttctgtagaatggacagaccagaatgattccacagcgtggcacaatacatcaagcattgtactcttcctttgataaatcggcagcccttccagaagttccgggcataaaagaatgtccgttggcagaaggctactttcatctaccgattgcttattatgctcataataaataaccgcaaacgttgttgcctcacttccggtccctgcagttgtaggtatcgccaggaacgggatatcgtttggaacggcccgcttttttaacagacaactgccatcccgggatgcctcctctaaatcagcttcacaatataatttaatgcattttgccacatctatggcagagcctcctccggcggcaataatgcagtcgcagtggaacttctgaaatgtgttcacgccttttatgactgacctgtactgcggattgggttcaaaatcactgaaatatgaaagcttgattcctgagcttccagccagccttacaagttcttcattcaacggcatcttcttccacgaatttccgcatacgatcagaggacattctgaagaatgatttctaaaaaaatcattcaaatactgcctgctctcatttaatgtgcgcaatggttccatatattttcctttctctttatacctcctccggtattaaagtaagtatttctttgatcgacatacagttatcatctgcttcctttgctctgtgattctccagaatagtttccgcagtgtttttcattgcaggaaacccgctcctagtaagctggtttgcataaatcaccacatttaccccgcacattctaaattcctcctcagttactgtattgaacgaggtgggaactacaacgatcggcgtgattggatccttttccctgaactttctgacaaattcaaatatctcatcaggttctttcttccgactgtgtatcattatgccatccgcacctgcctttacaaacgccccggctctcgtaagtgcgtcttccatcccctgttccagtataagactttcaattctggcaattatcataaaatctttcgttttctgcgcccgctttccagccgcgattttagcagaaaagctttcaacagaatcctgtgtctgggatacctctgttccaaagagagaatttttctttaagccggtcttatcttctatgataattgccgacacccccattcgttccagtgtttttaccgtatacacaaaatgttccgtcagacctcccgtatcgccgtcaaatatgatcggcttagtcgtgacttccatgatatcatctatcgtccgaaaacgggacgtcatatccaccagttctatgtccggtttcccttttgctgtggaatcacacagacttgaaacccatatggcatcaaactgaaatgtctttccttccttcagcaccttcgtcttttctacgatcaggcctgtgatcccactgtgggcctccatagccgtcgccagtcccttcatccgaatgagttttcgcagccgtccccgtctcatgtccggtatagaaagactaacccttgtacgttcttctaactcagcatacttttgctcccgtgaataagggtattcgactaattttcctccgtactcagcaagtattgagaccacttcatcgcgaataggtttctggaaaccgtctttccaatcatctccatgtaccacaaaggacggccgcagatgatataacgcctctctatagctgagttccttttgctcgatcacccgataaacgcccgatatattttcaaataacgtttttctctcctcaaaaggcatcagaggaaaacgtttataactggcaacggcctcatctgataaaacgccgataatgacttttcccagtctggaggccttttttattatactgatatgtccgctgtgaatcatatcagtagaaaaacacatatagaccgttctgttttcaagttccttcacttttgccgatattattgccagatcttccggtgtgtctatttcactgcacagatcgttatacatatccagcgcataaatgtcacattctcctgtgatctcattcagggcatgttccgcatagcactgccggtcgcctttttcacagtaggagataatcttatcaagccactttatccaatcctttttttgcagcttgtacagcggctgtgcagcctctgcctgttcaaaatattccaccccgactttcttaacttttccgtcctgaatgactgctttaaaatctttttccggaaggaccgatgttgaactcacagccatgcagcttgtcccacagtttaacacctgttccaaaacgttgtcttcaaacacgagatctccatgcatgagcagaacatcatcttccagatactctcttgcgcaataaatagaataaatatagttggttgattcgtaatctggattttggacgaacctgatatgtaacggcagttcaagggaagcacaatactcctccaataattcccgaaataatcccgtcgttatcacaacttccgtaattccggcattagcaagcattctcagctgcctgcttaatatggtatcgttatgatacagctctgtcatacacttgggctgttcacttgtgagagcccccatacgtcttccaaggcctgaatttaatattagtgctttcatctgctcctcctttttgcttttgttaatttttctttataagataacaattccgtcctataagaaaacagaaaatataagacgcctaaaaacattcccaaaatctttgatattatattaaagtctgcgtatacaaatacagggccgccggcaagaaacaacaggtctgcaataacattttttttatgcagcctgatctttactacctttgacatcttcataatacgcattatcacattggccgcatatcccattgtcagcgctatcggaacggcaaaaataccgcctttatttataaagatatatagaagcgcaatgtttacaccagccccggcaagcgtagaataaagcagtatatttgtctttttttccgcgttatatatatgtccgtaaaagttgcttatggcattgacaaaggatgatatataatacagcggcaggatcatctgcgtcatattgtatgatttatcaataaatacaggaaacagaatattggtcgcaacagtaacagccatacatccaaccgccattacgtcaagatatacctccagcattttgctgtaataccggctcctgtcttcactgctgctgtgctcatatgcgctttcctgccatgccagcgcaaatatctgaactaatgtgttaattagagcagccagctttgtcgcaagggagatatatccgttttctacttctcccagataatatcttgcaaaatatctgtttatattagtcattccccagaatgccaccgcattgatcgccagcggaaatgtatagatacagatctttttcagtaaatatatcgatatatactctttatgtattgtttttacatatttttcattcagttcaataaataaaaccgccgcaaaattagatatgacaggtgatataagcattgtgcgggaatcaagatgtattccgtaaataagtattaaacttaacacgatctgcagcccagaagatatcatgccggaagccataaataatttactttttcctctggctcttgtctcaaactggtatatgttcaacccaagaagggaatatccgtaaagcagcatcagcggtatgttgggcagcctctgccattctcctaatgccacacttccaacagtaaataccggggtacagattaaaatcaaaacaaagatattggtaaaaaccttctctttatgactctctttatccgagtcatatgaaaatcttaacagaggagtccacaactccatgaacaaaagcgaaacaagcatagtcactgtcgtcacggacaaatcattatttccatatgcggccggagaaaagttattggtgtatatcggaagtaacagaaaaatgatcattttgttaaaaataacacctataaaataaacaaacattttttttaaaaatcgcataccaatttcattcctcctaacctcccggcccatacttctttatcaagtgatctgaataagagaacatgaccataaatccccagaaaaacggtgaataatcgtaatattccgtcagcatcccggtcaaatataaaaacatcgtaaatgccaggatctgaacttccgttgattccttatacttcattgccttcctgcatgctaaaatcaaaataataatttgtatgactaaaagtatgatccctcccctgtacaaaatttccaatatcctgtcatgtgcatgtaaactgaagggatggttggcgcctttcccgttttttaatcctctgacaacagttgtctcaataccgtaccccaacacaggattccgttttatgtaagccagggtaatatcccacaatattgtacgtccggttagagttagggatttttccagaatagtttctataaaataagaaaagtagttttgaatacgaacaattactaatagccagaaacatgccgcatttataaccagataagttctcagattaaaaaatttggtgttaagcatttttctaaaaacagcaaatactacaaaaccggaaacgataacgagagatgctcctgaccatgtaaaaagtacggttaagactgaagtcgagagcagacacagtgttctgatccattgactccttaaacggtaataattcaaaagtgacagtgccattgccggtaagataaaattaatattttgattgtcatagccgagaaaataattattctcaaataaatacgttgaatataatccatccggaaatactataactgtaataaaatttatatatacataaacttctaaaatggggagcagtatattataaatccatgcagtgttttctttaaccaccatctcaagaaggagacaaaacgctataaaagtagccgattgaacaagactgcttttgatatcaccattgttttggactgtacgcaatataagataaagatgatagaaaaggatcataatgcttatataagaaatctgacccctgcctaagtagaggctcagcacgatcagagcaactatgatcttcattacattgtatatcacatcaacacctgcgatattagacagatacataggctccagaatgaccagaaaactaattaacactaatattttttttaaaaagtgcgcattgcttttcataaataaatcccttcagtatattaaaatatctcttcatgaccagaatatctttcatccactggcggtaatttcatataatccccatatagatgtgttaaatatgcttctacgttgtttactgcgggatacttatccctctcaaaacataccgtccccagcggggacagccatgcgccgtatatagtctcttttttgaggctgtatgcactgtaaagatttagatataaatcagaatgtgtttcttcaaaccgatattcattccaatggattatctccatgatccttttttgagatacaaaaaatgccgcagccttcgctccaaaacgtttacatttattacgcagcccattcttttcattaatatttatataacctaatttttgtttatagattttaaatgccattttacgtattacccactgggtcgtccgcataaatatgttagttgaggttttgacaatgggaaagatgtctatacatcccctgtttttatacattattttcccgaacagacggggataccggtcgttatctctgtccatatagagaaagtcctccgtaagttccgtgcggataacggaccgaaacatcactatattaggcagcgtcatcccaatatcaatatcatcatcccacgggataaacccttcatgcctgacagctcccaatactgagccggccagcagaaaatactctatactatgtttcttacatatttcatccagaagctttaatgcctcagcggctttcttttgatgttcccgcaactttagatcaactgttccgttcactgacattatgtttattacctctttcgttttcaggcggaactgccatataatctccgtacaaggctctaagatataagtcatagatgtccacgcccctgattgtcagcccctcaaagctatattccctgccttctccgtaatattttttaggcattatctcttttttaccgtaggcgccgacatatgtcgccgcaaaatctgcactgtcaaaatcatatttgcttaatacactgtgaagcctgcctgctatttttacactgtccaaatgtttttctatgccggtcacttcagcaaacttaattatgattttttcataccatggtcttgacctgtaaatattgacgatctcgctgaagtgtgacaattggaataacattctgtatattttatatttcaaataatggcattctcttttccagcctggttttggaaccccgtctatcataagaatatcgatccatgctcctgtatttactttatttgcagcattgttcagtacaaattctttgtgtttattggatagtattgccgtcatccatagatggtgcggactgaaataatcagcaagttcaaaacggctgtccaaaagctccggggccttctttaaaaacttttcataatcgcttcttggcattgccacgtctatgtcatcatcccacgggataaatccgtgatgtctgacagccccaagcatagttcccgccaccatataatatctcaacgacaacagctcgcagacccttacaaactcacagagcacctctaattgtttttgctgtaataagcttaattcatgtttcatacggtatatctccaactcccagtcactctttaaaaaactttcttaaacttggcagattttcatctttatgacttatgatcaagttctctcttccgccaatttccttcagcggccaccgtacatctatgaacgggtcattccatttgattccactgtctccttctgcataaaagacttccgaacatttataactgacaatagaatcctccattactaaataaccgtgcgcgaaatgttcgggaacaagcagagactttctgttttcccccgttagatcaaaccctctccactcaccaaacgtatcagaatcctttctcagatccactatcacatcatatatatgtccactgatacaccgcacaagctttgcctgctgccgctcttcctgaaagtgcagagcccggataactccttttttggaaatggtataaaaaacctctttcaattcgtagttaatgccatgatccataaaaatatctatattgtaatccttaacaaatccgcctcgttcatcttctgagtaaaacggtttgacaaggaaagctccctttagatccagctcctgaaactgaaatttctcgttcattctattcctttctcgatttcttcatagacttgcaatgccctcaaaaccgcctgatccatgttataatacttaaaatctgccagtctgccgcaggttatgagattttgatatgatagtgccaaacgctcgtattttaaataggtcttgttactgttctctgtaaggaccggataatatggttcctgtccgcactcagccttgttgtcatatggaacaggatattcatatgcagctaccgtccatccgttgccttcctgaaccggcatctttgtatattctgttatccttgtataccctggctcctgaggataagcaacaattgctgtattttgaaaacttcgtttttgataatatttatactcaaaatgtaacgaacggtaaggcagtgttccgtaacaataatcaaagagttcgtcgatcgcacctgtgtagatcactataggttctcttcctctgtaaaacagcttcctttgaccggcatccattttgatatcgggtaatatgtcactggacaactgaacatctatcagtggatgatcaagcagccgttctgccaagccggtaaatccttctcctggaataaattcatacttttcctcaaaatatgtatctctgtaggaaaatacaaccggcactctgtttaatacagaggcatctatttcctccggcggcagattccattgttttgccgtatataatttataatctttttcaaatagaaattgtgcgtatagccttatttcttcttcttcacaattgagcatttccgccactggcgcatatggtttctgaaaataagcagcaagcttattttttaatctctgcgcatcctctgttccataaaactggtcaatcgtcctgaaattaaacggagaaggcgtactaacaccatctattactgcctcacatctggttcggtatggaatctctgtacagtattgtcgtataaaagaatacgccttttcagaatcagtatgaaaaacatgcggtccatacctttgaatttttatgtcatgctcaccgatacagtcatatgtattacctgcaatgtgcggccggcgttccaaaaccaatatttttttgttcagcttgtttgcaagcatccgggccagtatgcttcctgtaagaccagcacctgcgatgacgaaatcatacattttattactctcctctaatttcctggctctaaataagtatttttcagccagctgaccgtcttcctgattccttcttcaaatggaactgccggctcaaaccctgtatccctcaaaagctttgtacattcatactccttttcgggaagtccaaagccattatatggaatctcccccaaatacaattcaatatccggatctacggtatctcttataagcgttatgtactctttcaattttcttggttttgtacttccgagataatactgggtatttttacttcccttacatgccgcagcccataaggcccttacagtgtctgttatgtacacaaaatcatacatctgttctccctctgtaaaagcggcgcgttttccctgcagcataagtctgctggcaaaattcacaaaattgtctgttgtattaccaacaccatatgtatttgataataagcaccatatatgttctatcttcagcacgctgcactgtatctttgtcataaaatgagccgtgaccttagcggccccgtacatactgactccattaggtgtcgcaccatctgtcggatgataccttaatacatctttttctgccaatgttcccgctccgacgaaacgtggtatattcatactacctatggcctttacgagatcaacagaccactcggcgttcttaagctgcagtcctgcatcagctcttgcatcaccagcagacccctcccatgccagatggatacagcagtctatatctctgtcatcaatgatctgcggcagcttctcgatgttctccatgccgcagcggacaatgcgtatgcctgacggcatgtccgaaggtattccgccatctttcttattacgaacgaccgctatgatttctgtcccatggcccaggatttccttgacaagttcttttcctataaaaccgcccgctccggttatcaatacttttttcatctatctgtctccgtattcaggaattcgttgatctgctgatccatacaacgggcaacatcccctccgctcagccagcattcgctccactccacgaccttttcaacagccttctccacgttccaccgcggtctccagccaaacatattttttatcctggaacagtccagtttcagaaaactggcctcatggggccctccgtcatattggccgtcccatctcatattatctctccacttgtctgcaaacaattcgaccagtctccctgtctcgcagcagtctctctcgtccgggccgacattgtaatgacccgcgcaggaattgtcactgatctgctttgcagcgatcatggcatagacataaagaggctccagcacatgctgatatggacgaatggaacggggatttctcactaccaccggctgatcatgcataactgcacgtatacagtccgggatgatcctgtcattagaaaagtcccctcctcctataacgttgcccgcccttgcggtagatatcggtacaatgtaaccgccatcttttcctttaaaaaaagaccttgcataactgcgggtgaccaattcagaacaagattttgaattagagtaaggatcgtatccatccagttcctcattctcacgatatccccactcccactctctgtttaagtagactttatctgtagttacattcaaaacagactcagcacacgaggtcgtacggacacattctaatatgtttaccgtccccattacattagtctcataagtatatgcaggatttctatagctgtcccgaacgatcggttgtgccgccagatgaaaaattatctcagggcataccgcatcaaaagcttttttcagatgtttataatctcttatatctcctgtcacggaatttatagcgtcctctatttgagcgatcttaaacagcgacggttctgtcggtggggcaagtgaatatccagttacctccgcccctgcgttgacaagcattttacataaccacgtacccttaaaacctgtatgcccagtaacaaaaacacgtttatttttataaaactctaaatcaaacacttagttttcccccatgatttcttaaagagcttccttccatattctccatggcgcctcaccgccataccacagcttttccagcttttccttatcccgaagagtatccatacactgccagaatccacggtgcttatagcacatcatctgtccctcagaggccagcctctccattggttctctctcaaacattgtcgtgtcgtcagatatataatccagcaccgcggggtttagaaccataaagccggcgtttatccaccctgtatcacgcgtattcttttcccggaaggaattgatcttatcctcttctagatccagatatccaaaacggccctccggctgaatcgccgttattgtggccagcttgccgtgtctcctgtgataagtgagtgtcttatctatgttaacgtcacacacgccatcaccataggtcataaaaaacgtatcatctccgataaattccttaacccgcttcagtcttcctcccgtcatagtgttcagcccggtatcgacgaccgtaaccttccaaggctcagcatatttgttatgtacgatcacatcgtctcctttaacaaagtcaaaagtaatatcagatgtatgaagaaaataatctgcaaaccattcttttattacatgctgcttataacctgcacagataataaattcattaaacccgtagaaggaataatatttcataatatgccaaagtatcggcatcgtcccaatctctatcatcggcttaggtttcagctgcgactcttctgatatacgggtgccaaaccctcccgctaaaataaccactttcatgaactgcttcctctcttttttgtcatttgttttctaaaacattccaccataggatacagataagcctgaacacatcccaatattgccgacgtgatacactgaggcaatttttggtataatccaaatgctactttgttcttaaattttctgttggactcccatagtctgtcagtcttgacttccgtttccgctttatactccagatatttttctctgtaagggtgtgtacacccttcgatccagggcctggactgtatgatctgatttgttgtaaagtgcacgataaccggacttcggactgcctcctcatagtcaagcattgaaaaacaggaggaaggttttctgtatcgtttcatattctgataacggtataaaaataaagcggtcgtacaattatatttcggttttagtatctctatatttccttcaaagagtacatttaattcatcctggacttcataaaagcatttgccatttccttcaaggagcagcgaactcattttttgcgtaatgttatcactcctccacttgcttaaattaatcagcataattccactgttaatatatttagaggttatgttcagtccaagggttcttttataccagttgctttttatatcgtccgccgccgcaagatatgcagaggaaatatctgtattccacagctcttccaatgaatcaagcaccagagtatcacattctaccaacagtaccttctctatatcttccggcagaagctcatggagaaaacagtatgagtagacaactacatttgtccttactaatcctcccgagtatatacttaaatcacgcatcggaataaaacacagttcacggtcgtaaccatctgccagatcaaataaagcttttttattttcatccgtaatattgttttctatataaaaaatacgaagcttttcaacatgcttgttattttccagaagcgactttatggaaactattcccactctgctgtataagtcgctgctggcgtatactatatccatacgatttcctcttctaaacggcgcccttttgtcccaatacgatcagcacggtacgccagatgatcttcaaatcttctcttaggctccactctgtaatatacttggcatccagcgccacaatttcttcaaaatccacaatgtcgctccgcccgctcacctgccacattccggttatccccggccgcattgcaagcctcttgcgatgtctcatctcatactgcttatattcatccacagtaggcggccttgtccctacgagactcatatcccctttcaagacattccagaactggggaaattcatctatactgctttttctcaggaaatgtccgatcgggattatcctcgggtcattatccatcttaaacatgaagcctttcattttattttgctccatcagctcttttttccgctcttcggcatccatatacatggtgcggaacttaaatatacggaatttccggccgtttcttcctactctctcctgtgagaagaagacaggtcccggcgactgatgccggatgacgggcgcaaaaatcaaatatgcggttccggtcaggagcaggccgaccaaagctcccaatatgtccatcattctttttacaaacatctggttgggcgtcacaaatttcatactcgacgacagaaccgtgtattttgcaaatgtatgtattttcttgttctccatattagaggtaaactgcgacaaattaatatgaacggtcagtcccatatttaaaaacagattcatcagctgctccgcctctttctcataacctgacagatctatgaatacctcatctacgatctcgtcgcgcatatattcggcaatatggtatctatctgaaatcacgcgcactcctctaatctcttttccgacctcttccggcttatcatacacaaccataccggcaaacatataatctctgtatggctgcatcagccccttcaccgcttcttcggcatgattatcggtcgtgatgaccagaagtcttctcaagtcctttctttccctcatacggatgcggataatgcgtttccatacgagcctggccacgatcatgatgcatacgcctgccgggtacatgcacaatacaacaatacgtgaataatcgcccgactgtttgatcacaaacatccatatgatcattcccaccacaacacaggcacaatgtactattacttgttttaattcaaccagatatcccctctgtataatgttgtcatagctgttggcaaaaaagacaacacatatgtccacaagtacaatggcccacatcatgctctcataccggtccgaaaaacctttccacggaattccgttacgatatacatatgcaattaagaatgccagttccaggcatatgatatccagtatcgtgaaatcaatatgcttagtccagctctttacaatattcctgtacatgtcccgccctcacaaaactgtatctcccagatgctactgtacctccagcacctgtttcatcttactttttacttcttctatggatgccgcatccggctgcatgacatacaacggctgtgttccggaggaaaagcatgtctgcgtatctcctgttcctgcagccgcagctgcttcaatactccatcctgccccatctgaaagctgcatattgataaacttcgccatctcattttctgtcatgtttgtctctacacagtcgctgacactcgctatgatctggttagcatttttgatgatcgccggcgacatggctttctgtaaaatagcggtcagcaccgcttcctgatttttcccgcgctgattatctccgtcctcaaagctgtaccgctctctggaaaatccaagcgctgccgcgccgtccatatggtttattcctttttgaatcttatattttccgtgcagcgtagtgaattcgtagtcagaattcacatctatgcccccgagggcatcaacaattgtgatcagagaagtaaaattgactcttgcataataagtgatatcaattccgtaaatggattccagcgtgctcatagacacgtccacgccatatattcccgcatgagtcagcttgtctctttgttctcccgacactcccggaatctggacatagtaatctctgggcgttgttgtgagcagaattttcttggtgtttggattcactgtcataataatgttcacatcactgcggctgttcgttgtaatgggacctgaaacatcaattccgcttatgtatatattgaacggttcctctatatttgtctcctcctgctcgagcggcgtgtcaattccatattgatataaaattctcacctcagacgagtaatcttcaatatcatcctcaataatacctgtaaaagcttcattgtagatggctgcatcaatccttccttttagcagcgcttccgccgccgcctgcagcgtgtcatactcttcaagcttcatatctctgcctatgactttctgcacatcttcgatcattttcccgttattttcctggtccaccgatgtctgcactccaaagcggtagttttttgcggccagcagatttgcggccggatcatcttttttgaccacaacgatcatattgtctgtcttgtaggttgctcctcctacatccttcataagctgggcagcctgcatgatatagaaaatgcctgcggccgtcgcggcgcttataaggacactcaggacaattccaacaatatgtattttgttctttacatactgcaggccgaaacagaccgcaaataacaggataagcagtccgaacattactgccatatattttgccggcagccatccgctgttaaagacgactacagccagtacaacggaaagcagcagctgtagaagtgtaataagcctgcccgccatatgtgtacttttcttcttacttgaatgcgtatgtgtatgctttttcatatgtatctccacttcttattgtactgtcagactaaatgcttttacgtccgacgtattgccctcgctgtcactgacatagaatctgagttcatatgtccctgcagtatttatgtcatactggccgtccacatgaatatgacggtatagagtattctggtcatctttatcatccgccacgcctttcacataactgagggcatcaaaaaccccgcccgccttgatctgagcattgtcggcattcagcgcgatgaccggccttacaccgtccggctttaattcctcactgtcagaagcctcgtctttgtctcccggtgtgtgatcttctccgtctttctttccttccgttttttcatccggcatgtcaccgctttcatccggtgagtccgcctgtatccccgtggcaaatttcactttccgcacagcagtcccgacattcctgttgctgtccatgactccgtaatatacgaccgccttcccattttccagaggtacgatcttatatacaaaaaccgcatccgacaagtcgccgtccctgtcatcctctgccgatactccttttagaaggccactgtaatcatctccttctgtgtaggatatctccatctcttttacgacaatttcaggcggtttgtcatcatgccctgcatacagaaaaaatgataccacagcaaggactgccgaacctgctgccagagccagggccaataaccgttccttcatcttatgttaccctctactttttcccgtattctccataatactttccataatattttccgtaatatttattctgcttcatattcactttgtttaatacaacgccaaggatcggacaattagatttctccagctgttcctttacaactcttgcgaacttatagctgatggcatttgccgctatcacgagcactgccgcgtcacacacagcagcagcgatcgcgctgtcaataacgctgcccagaggcggagcgtctatgattatgtaatcatagatctttctcgcactggtgataaaagaactgaagcgcttatgcccaaggagttctgccgggttcggcggtaccactccggaaaatatgaccatcagtcccggttcctgggttttgtatatgatatcgtccacctccgactgtcctgacagaaaatgactgagcccttttaaatccccattcactttatgccttcccatcaatactgattttctcaaatccgcatccacaaaaagcactctctttccgccttctgccagcgattgtgccagtgacagcgatactgtacttttcccttcgttaggagtacagcttgtaaatacgatcactttattgtcagcgcctgaaaattccacattcgtacgaagggtcttatatgcttcattgctgcggtaatcttttgtcatattctttaaatatatttcctgcatttccatcatcctccttaccgcttcatactcttcacaaatttcctggcggacatgccctttacctttttagactttttgaccccttcctgaattggaatggatgtcaggacattcagtccaaggtaatgctctacatcatccggtgtcttaatcgtatcgtccagcacaaatatgagcacaataatgccaagagcaatgataagtcccagaagaccgcctatcgccatattttttacaaggcttggcgacgaaggttctgtcggaagatttccctcttcaaacgtatttacggaatctgcatccatgatctctgttatctgtatactcacggattcacgcagcgcatctgcgatttccttagccatcttcggatcctgattctcaactatgatcgtcagtattctcgtgtccacaggtgtctcggctgtgatcgtttcctccagttcttctgcttccatatccagattcagcactgctatcacctgctccagaaccggccggctctttacgagttccatataatctttggtcagctgtgtcccggtctgaatatcgctgtaggtcacgccggcgctgctgtcctgcttcgtaagaacatacatctttgtcgtggatgaatacatcggcgttataaacatctttgttcctgcaaacgcaagcaaagccataaagatccccgccagaataacaaggtgtatcttactccacacagccagaaacaattctgtcaggtctatgtttatctcatcattttcaaattctctgtttgcaacactattttgattcattctcaacccttttcttcagcattatcttcgcattgctgaaaaatatcctcctcatatagtcttctccatattttttctccacataatctgccgccttcttcattctcggagcccggtgcgcggcgccgtgggcatccgttcccacacagaacaccagatcccggtccataagttcctttacaaatctttttattctcctgccgctgtcaccggttatacttccggcattaatctgcaaatgcgcgcccatctcccacagatgctctgcaaaaaccacattttccacaatacattcatatctttccacatgagccaggatgacctcgtaaccgttcatctgaagctgctggatcccctgctgaatatacgtatatgtatcggaaggggaaaattcaacgagaatatattctctacggttcatgctgagtattcttcccttttttaactttgcggggatatcctgcccgaagtagatctcagttccgagatatatgcggaaccgctcatcgatcctgtgcgcagcccttctcagcagctttaatctttcaagcagcacgtccggatgttcctttcctcttctcggatggtaatgaggtgtggctatcatgcagcggattccatcgtcataggctgttttcagcatccgttccatctcttccacactcctggctccgtcatcgaccgcaggcagtatatggcagtgcatatctatatatccgcccataaatcttcctttctaaatacttatttccatatctttgtactgagacaaaggccttatttcacggcttccgggcagcccgtaatatggtaaagtacactttagtacactttaaagtacttcggaagaagtgcttttttattttgtaaaaatatgtaaaatcgctatatctattataacctttcctgtactaaaagcaagtatttttacgtgtacttttacatatttttatgtattgcacattttcttaaaggtcgagcagcttaacatggttgaaaaaataacttctgctcacatcaagctgttccagcgcctgctggcatgttatttccttctcccgccacttaagcaccgtttcccgaaatccattgggaagcggctttttttctctcccgaactttactccccgggcctttgcagccgcaattccttccgcctgccgctgcctgatattttctctctctgtctgtgccacataggacaggatctgcagcaccagatccgcaataaaagtacctgtaaggtcttctcctctcgcccttgtatcaagcaggggcatgtccaggataactacatctgccccgatcttttttgtcagtattctccactgttccaatatctcatcgtaattcctcccaagcctgtcaatactctttacgaataaaacatcacttttttttattcgcctcagcagcttctgataagccggacgcgcaaagtcctttccgctttgcttgtcaataaaaaggcggctccggggaatatgatattccgccagagccgctaactgcctcgcttcattctgatctttagtcgataccctgatgtagccaaacgtatttgacatgcgaataaccctcccttattcatattgagaaactattttcagttatctctctattttagaagaattattccataaattactactgtaaattttttccaacttcctggcctctcggacttcccgccactccgcctatacctgtctcacgcagacttacgtccatcttttcaccgacttcccgcatggcgtcgatgacctggtccaccggtatctgactcacaatgccggccagtgacatgtcggctgctgccatggcgttcaccgctccgcccacattccgcttaacgcacggtacttccacaagtcctcctaccgggtcgcacacaagacccatcaggtttttgagcgccatagcacaggcatgtccgatctggtcaaagctgccgccgcgcacataggtgatggcagccgcggccattccggaaccggatccgatctctgcctggcagccgccggaggctcccgcgagaaacgcccggtttgcgatcacctgcccgatacctgccgcaacatacatggcctctatcatcctttcttccggcacatcatactcccggaaatacgtcacgagcactgccgggagcaccccgcaggcgcctgccgtgggcgctgccactatacgcttcatgcaggcattattgcatcccatctttaatgctgtcgtcatgactttcgccatatagccgccgcaaagtggttcccctgtctttgcatactcttccataaggccgccctctttccccacaagaccgcttctggagatgagccccggctcatatgcgtcgactccgtcgagcatagcctgccacatatgcttcatctctttccacgaatcttctggagcgacatcacgctcagccgcatcttctaactggactgccttccagaaagatatctcttccttctcacatcttgctctgacctcttctattgattgaaatgacatacgttcttcttcctcccgccgcttatttctcttcgatacttccgtttacattcaggaatgtgacattgacgattccctcttttccttccagccggtcgagcgcgtctcttgacacgacctggtccgtctccactaccatgaccgcacagccgcctttcttatcgcggaacacctgcatcgtagctatattgatgtcctcttcgctcagggacgccgcaacttccgtaatacatcccggctggtcgatattgcgcacaatgagtgtattgctctcgccgctgaaactaacgtctataccgtccagtttgctgacacgtattctgccgcctccgatagaatatgcctcgatcttcattttctccgcgccgtctgcctccagtatgatctgcgccgtgttcggatgcgctcccctgatctccttttctgaaatggtaaactccattccttcctccgctgcgatctcaaagctgccgggtatacgcatatcgtcaggcttcatccccagaagtccggcgacgatcgcccggtctgtcccgtggcctttccccgtagccgcaaaagaaccgtgcagatagatcgtggctcttcccggccttctgccaaataactgggtgctgatcaagccgatgcgtaccgctcccgccgtgtgggaactggatggccccaccatcaccggtcccagaatatcaaatatactgcccatgttataacctctcttttcttaagttttgctttcttttattatactttggttccgggcggtttacaacgactatttcaccctcctgacctgagtcttccaagacaccctttccgcagatttcacataatatgcattaactactatatttatgagagaaggcacattggtatgtattttttatttcctctgctgctcctgtttttgatggcgctggcagttatatttcattttcgcaaaaaaagaatcatctgtaaaataaaatgtatgtgtactgaagaaaagctggaactgctcaacgaaattaccgccccctttggtttcagctatgaattatgccatgatgtttttacttcccgtacagatgcatggcagaaagaattcggatacagcggtctctacgataaaaacgccgttcattttaatatggtgttcgactgcgaacctgtttattttgatcacaacggacgtacctggctgatcgaattctggaagggccagtatggcatcaatatcggcagtgagatcggcatctatcaggcagaagatattattccccctgccgaaagaaaaaatgtactgtttcacgctgtaccggaaaaggatatggtctcgttctctgtccgtctgttcaacggcacttctcttctatattccctgtcccgccggaaacactggtggcttgccggcttcagcatgggatgttattctgtgcccgagctgctgaaaatggagatcaccatatccttcggaaaccggcagatgatgcatgcctttctgggcggtatgaaaaagatcggataccggccaggcgagatcagcatatgcggtaattctgtctcctttgatttcgacaggcccaaaacacggcagccccgcatgtcacatcttctcaactcggcatgggcgctctggaaagaccggctgttcctcttgctctactgccgggtcacgaaagtattctgccacacacttgataaactcctgtacctgtatgagtatctgccgttcgtcttccgtcacatgatgcgcattcactgctattcccaccgcagacaccagaggaggaaacgatcatgagcacagccgcccgcctggacttagcttttaaaaacgcccctgtgctgcctttggagcctgattccaaatatgtactgttcagtgactgtcacagagggacgggtacttcaaatgataattttctaaagaatcaaaatttatattttgcagcactcaaacattattatgaccggcagttcacttatattgagcttggagacggagatgaattgtgggaaaaccgttctgtggagcagataaaatctatccatgacaatacgtactggctcctgtcgctctactacaggcagaaacggctctggatgctctacggcaaccatgatctcgtaaaacggaatccccgttactcaaaacaacatttttcttcatatatgtgcagtacaaacaagaccgagccgttgtttcccggcgtcaccttctatcagggattaatattgaaagactccctcggcacaagagacgtgtacctcacgcacggccaccaggctgatgatctgaattcggtcctctggaagctctcccgcttcctcgtacgctacatctggaaaccgctggaacatatcggctttctggaccccacaagtgcggcgaaaaacaacacaaagaagagaaaaacagagcggctgctcacagactgggcggtggacaacggaatcctcatcatatccggtcacacacaccggccgatgatcggtacaaaagaatccccgtactttaataccggaagctgcgtacatccaaggtgcattacatgcattgagatcacaaaccgttgcatgacgctcgtaaaatggacgctgcgcacgcgggacgacatgacgctctatgtcgggagagaagaactcgcaggccccgtctgtatagacgaatattgaccgccttactgtaaatttccggtagccgcaaaagacaccgccgcccatctgcaggttgtcaaatcacccgggatatgataagattgtgtacagttttttagaaggaagtgttgcacaatgaataaaaaagaagtacttgagatccgcaagcagttttcaccggagaactgcacgatcacccgaatctgcggctgttatgtagaccatgaaaaacagaagatactggaacttaagaaggcatttctttccatgccggaggatgaggcttttaaatatttcgatatatttaagaagactctctccggcacgatcggaaagaatctcatgaatatggaatttcctcttgaccaggaaaagccggggggcacgcaggactttctgctcaaactgcgcgacagccgcctggaagatgagatgatcgtcgaagaattctatgataaggtcattgagaattacatttatgccgagaactattatatcatcctcatccatgccgcctatgatatacccgggaaagcgtccgataacatggaaatgtttgacgcctcggacgaagtatacgagcatatcatgtgcagtatctgcccggtcaatctgtccaaggcgggcttaagctacaacgccgcgacaaacagcatcgaagaccgcatccgcgactggattgtggacgctcctgcaaagggatttcttttccctgcctttcaggaccgttcttccgatatacataacatcttatactactccaaaaagccggaagaactgcagcccgactttattgaacatgtgctcggcagtacgataccacttacggccaaagaccagcaggagactttccacgccatcgtaagcgatacgctcggggaggaatgcgattatgaggttgtccgcaatatacacgataatctgacggagcttatcgaagagcataaggaagcaccggagccgcttgagctttcacgcccggatgtgaaacgcctttttgaaaaaagcggtgtcccgaatgaacggatggaatcttttgaccgtgactatgaggagatcatcggagaaaagaactcacttctcgcttccaatattgtaaatacgaaaacattccagatcgagacgccggatgtgatcgtaaaagtcaacccggaacgttccgaccttgttgagacgaagctgatcgacggcagaaagtgtcttgtgatcgcgatagacgaccatctggaagtgaacgggatcgagatcgtaaaataatttaaaaaagtgcaaaaaaacatttgccatatcgcataatgtatggtagaatattttttgcgagcggagatggcggaatggcagacgcgctagattcaggttctagtgggagttatcctgtgagggttcaagtccctttctccgcactggcaaaaaagcaccaaacaccgtagtattcacggcatttggtgctttttctttcacatattttcaaaacgagacaagcaattttatttaccgtcagctcttagtttcttataatgcactccccttaccaggtacatacagccgtgacagatccgctccttccagttcaagcagcttcacctttgtttgaatgcctccggcataccctgtcagactgccgtctgctcctgccacacggtggcagggaatgatgatagatataggattatggctcaccgcgcctcccactgcctggcttgacatcgtctctctgcccatcttttctgccatccttttggcgatgcttccgtaagtaaccacctcaccgtatggaatttcacatagaatccgccatacttcctgacggaatttactgccggcaggcgccagagacaattcggagatatccggctttctgcctgcaaaatatctgtccagccagctcttcacagcgtcaaataccggctgtctgttattctctgtcatatcctcacgtatggaacctccgaaatatttctgcccctccagccacaggccggcaagactgctgccactttcaccgcaggccagtgtgatcatcccgaccggcgatggatatgtagttgaataatacatatgatacctccttttaacacatgccacaaaatgccctttgtacggcactggtccataaatgtagtgcctccggcgttactcctcaatcttttctattactactgctgttccgcttactatagccgccactatcatatcagaaatggacgtaatatcaaaatctattccaataattgcattcgccccctttacaactgcctgatcgatcattttttcctgggccgcaaatttggctctggacaatgaattatctatatttattaagcgacccaccgaatattccccatgcacaatatcaatatacctgctgatcctgtagccctcaaaattgtagcccgtggttaccatcagtttgttttttctcgcttgctgctccctgtgtatttctgcttcttccaatttcctctgcgtcatacattgtctgttgtcttctaattttttaaattcttcttcaacagctttgacagcttcctgggaggcgctgttctcagccattttattttttatattatcttgtgccttctgaatctgttccgcgttctctgcctttttgatcttttcaaacatatcggcacactgataacagccatataaaccgtacggcagcttatacttattctccaaaaatgaatcgcttatctttctaccgcaaatgcaacaatttggcatgacatctgttctccttttcccggtatataatatttgttaacgtataactaaatcttaacatattattccggctattacgacaaaaataagacaggggcacctttttcccaggtacaccctgtctctttactttttactgcaccttctgcagctatccgctgctaccaggagcctcagccgacgccgcagtctgccggatggtcatttacacatactttgctgtgatacttttctatctctgtattccagaaccctttatccttcgctcctgcatacgcatcaccaagcactgttccgtcccggccgaccatgacggttaccggagcatcgccatatttgctgagaacattcttctccatctcttccgaggctatcatctgcacatagtcggcattaacctctgctgctgcagcctcggcctcggattcattatccgcattaacacctcttacaatgccgaggatctgtacgccttttcccgcatattctcttccgatctctccgagcgcttccatctctcctttgcaggaatcacaggataaatcccatatatttacgaccgtaagttccgcctggtcaaatatagtattcgtgtttgtctttataccgttcaatgcgtctgctccgtagtttccaaactcctcctttttctcctctgtcctggcttccggatcctttttctccgcttttttgtctgccgcggcaggactctgacaggctgccagaagcagcgctgccgccataacggcgagcaatactttagccttcatatgtcagtccctccacaatgatccttttactccaaaggattctggcaagtttcagcttcagcgtatccgcaatactgactccttttcccggcagaacgatttttcccgtctcgctcgggatagtcctgtaacctatttcttccagattttcaatttcttcctcgtcagcaaaccttgctgacatctccacataggagccgcctcatgtattgcacaccgtcggctccacgacgatatccctgtattgtttttcttccatatattccttcaaactgttatccattacaacattcatgactgttacctcctttttcattatgcgttcatgatatcagatttaaaaccagacttctgtgattacgtcacattaagctccaaataatatgccggacttacgtaatatttgttcaatagccgtaaaaatacggcatccttttcctcattgacttataatttattaaaatatacttatatcaagggggaatcttatgaaacgtaagaaaatctgtaccgtaacgctggctgtactaagcggtgtcgttattctatcgctcgggacatttatcacttcctttgccaaagaagacagttccggcagtcaggtgactacgatggctgcgactgccaatctcaatctgcgcgatgacgcaggactccacggaaaagtgatcacggttatgccaaaaggagcctctgtggaagtctacagcatgacctcagccggatggtacaacgtaaagtacaaagatcagaccggttatgcatactatgtatatctgaattttgaggggacagacaaaggcactgtcaacgacggaaaggttactcatatgtatgccacagctccgctaaatgtccgctctaaaccaaatacgggcagcgcgattcttggaagctttaaaaaaggagatgccgtcacggtagtgagtaagcatgacggttggtttaaagtggattttaacggaaagcaggggtactgccacggcggctatctcgacttcggaaaaggggatccttctgttacagcagatgagagcaccatgaatgatatgaccacatcagccccgctgaacgtccgcgaccgtccgagcatgaagggtaagatcatcggctctttcaaaaaaggggaaactgtcaaagtgatcggtcaggaaggcaactggctgaaagtaaaatataaaagcacgaccggttattcccatgttgactacttaaaataaacagccggacaataacgcgcagttcccccaagtggaaactgcgcgttattttttatacgtttctatctctattcacagcgacgtacagaccgctatacctgcctcatcttcacatcaaccgcttcttttctggcattgtgctcctggttctgattctcaggcttcaccttttctgtaacgctgttgaacttctccagattctttttctgattctgcttttcctgtctcttattgtccatattatcacctcataaacagtgtttctccgcaatacatatattatactgtatactttttccacagaagtacatgctatataaaaaaggagtgttgacatgaaagacctttcagaattaaaactggaccttacaccagaagcccttcgcagcttagctgacagaaaatcaaaaaaccggacagaaagtacgagtgatatcacgattccatttccggaagaactgctgcagaaaaccgatcaggaagacaagacaaagggataacatttaaatttttaagaaaaccttataagtttgtgaagcttctgtattccctcttgagaaatttcttcaaaagatatagaataaaactcattgttaggagggatcacatgaataaatatattgataaggattatgacaaacattttgacgatgattttgaagtgatttacgacgccctggacgagctggatgaatatatagactatgatgatgactatgaggcagacgcctttgaagacgatacgtattctgacgacgcatccggggaggacgtccaaagaaacagacagcggccggccggcagaaagagcaggaaacaggacgggaaaaacggcagcggcaataagtccgcggataaaaaggacggcaggaaaaaaagccggcggaatctgcccaatctgctctcccctgccgcaaagacagtcaaagccggcgggaaggcggcaggcagtatcatccgcacggtcttaaaagccgcatccttactgcttacggcaatcattatagtcctgctcgctgtaagcttctggaaagggcatacggtgtacgggaatcctgcagcagccgtcgcagaaaagaattatggacttgccgcctactttggctttgccgccctgctgcttctctttgaactgatttctttcttctggatcttatccggacagaagataaaggatggccgcagaattcggaaacttgatacaggaagaggattatgttccttcgtcatcatctatgccggttcctttctttccagttcctttggcagcctcattcctgaagcgccccaggcgctgagcggcttaaagggagccgtaacagtctacggctccctcgatcagacgctgtttattttatgcgccgcaggtcttgtcagctgccttgtgcgcaaatttatttttcattagccttttcatcctcagcttccgcctgctgcagaaagtctgcatctttcgttttaagtctggggatgaatctttttgcgaatttcccttttcctctgttctttacataaaaatatccgatcactgaaaatacgactgcccctgcaaagtttacgagcagatctttcatcgtatcgataagaccgatatccaggtagcccccgagtccgagactctggccgtttaccgcggcgtccgtaatgttttctataacttccgggtggtttccgccggccgggtccagcattacagacgatatcgtgtgcattatcgtatccttctgcatgtcaaaatggaatatctggtccataccgaactcaaagaactcccagatcacaccaatggtcatggaaaagcagaaggcgactatcgctacaaataccggggacagcctgatggaaaagcgctcattccggttcagtatatctacgagcgcaaacccaatggccgccatcaggaacccgttcagtgtgtgcagcaatgtatcccacgcagggaatttgatataataagcctgaatctccccaagtatctcagctgcaaatataaacagcagaatgatgatctccagtgcagttggcagctctattttcagatttacctgtacaaaactggggactatgaggagaatcaaagttaataagcatagaaatacattttcaaaattaccattaaatatctgcagtatcattattaaaataacaagtgcccgcagtgtcacaaataccataaaagagcttttgtgctctcttagttccatcttgagggccctgcccatgatcttgatcttgttcatcattttcttcatatgtttttcatcctatttatgcctgctgcagactattccaaaaagttttctattatgactccttccgcttcctcttccgtcatgccgagggttctcagcttgatcagctgctcatcattgatacgcccgatcgccgcttcatgtatgatcgccgcatcgagatgtcttgcatttatttccggaatggagcatacttccgccttatccatgataatagaatcacactgtatatgggcatggcattttgcgtttccgacagccttcgggtggaaggtctgttcggaacttccttttgccactgatctggacacgatctgcgcagagctcccctcgccgttcatctttacttccatgtcggactgggccgtctggctgtcatgcgtcatcaatttttcgaccacataaagtttcgcgtcctctcccataatgacatctgtagtgcggaccgtagagtctacacctttgatctgcgctgtatcaagcgtaaataccgcgcctttgtcaagtatgatctttgtcacagggttcagcactcttgcgcctgtcccctccccttctccgtaatgcttttcctcatagcggacatttgcccccttgcccacgtgaaaggtatggatgccgtcatgccggctctcgttacagccgctgttatggataccgcatcctgcgattatggtcacgtcggcgccgtctgccacaaagaaatcgttgtaaacctcatccttcatgccggtggcattgactactacaggaatgtgcacctgctcgccatttgtattttcgtctatataaatgtctattccctgcctgtctgtcttcttctttatcttaatatgctcactgtcgccgtggcacagagccgttccgttgtatctcagattaaacgcgcccttctgcctgaatccggctccgtcgatctgctcgagcactttctctacgattttgtccaactgctttcccaactttaactcctccttcttattggccgtccatacatgcacactgttcctcgctcagcagactcggaaggatctcatcccgtgtgccgatggcgccgatcttgccgttctcgatcaccatgatcctgtccgccatctgaatgattctctcctgatgtgagataagaatcaggctctgttctttcttttcatggatccgttcaaactgctgtacaagcatggagaagctccacaagtcgatccccgcctccggttcatcaaaaatacagagcttatggggtctggcaaggactgttgctatctcaagcctcttcatctctccgcccgataaagtagcatccacttctctcgtgatatactccctggcacagagccctacgctgctcagcatccggcagcactccggttcagtcaaagaccgtccagccgccagtgataataatttatcaactgtcatgcccttgaatctgggcggctgctggaacgcaaaaccaatgcccgcctccgccctgtggttgatatcatagtctgtgatatcctcgccgtccagaacgatccggccttcgtcagcagcctctatccccatcagcaccttcgcaagacttgacttcccgcctccgttagggcctgtgatcacaagcatttccccgtcttccacctgaaaactgatatccttgacaatacttctttgcacaccattttcatccactttgaatgtcaggttttttacttcaagcatcctttgcatcgctcctttatttcttataaattccaggaatcttatatgttccctacattgatttttaacagtacgagaccattataatctcttttatccacattatcaacagaaaggaatacaaaaggggacacggcaaaacgagttggggacggggttttttgaaaaaaaacccgtccccagcctggtccccttttaatagttctctacttttctttcaaagtatgctcttgaatatccgcatgccgggcatctctccggcgcttcctctccttcgtagatgaatccgcactggcggcatttccatccaagcggtgcatcacctttaaacgttttttccgccttcaatgtctccaggatcttaaggtaacgtttttcgtgggaagcctcgaccttggccacattgtcaaacttcacggccagtgcctcaaatccttcttctcttgcctcttttgccattcgtttatacatatctgaccattcttcgttctcaccgtctgccgcagtctgtaggttctccgcagtatctcccaggccgtggaactcgctgaaccacattttagcgtgctgtctctcctgctcggcggtctctgtaaatatggccgctgtctgttccattccctcctgtcttgcaatctccgcaaagaaggagtatttgtttcttgcctgtgattccccggcaaatgcttccatcaggttcttctccgtctttgttcccgcatattttccgccgcctgtcttttcttcttccagtctggcaaatttgtcagctcccaccttacatatcggacacacttccggtggattgtctccttcgtggatataaccgcatactgtacatttgaattttgccatagtcttgttctccttttctttctcttttttgttagttgtatcatttgacaaattgtcttgttcctgtctttgcccagcctcacccgccgtctcccacggagaaggcgtcagcggcttttctttcattcctgccgttcccagatctgcgcttctgtcgtgatactgtgtgtgcagaagtttctctgccaccgcgctcaacggctttatgtaatattcttcatatacttttttgatatccgggttctcgtgactgtaccgcaaggtcatagacgcatctttgtcatacagcgctgtgatccgcgcctgtctgaccgcatcggtcataggcacctccgtcttcggctggcctcctcctccgatgcatccgcccggacaggtcatgatctccacaaaatcataagtctgttcccctccggtcatgcggtcaataaactgtcttgcattttccagaccgtgtataaccgccagtttaagcggcactccggcaatgactacttctgcctcccgtatgcccgccatgccgcgcaccggttccagcttcagataatcctcaggaggattctccccggtaataaggtaataggccgttctggcagctgcttccatgacaccgcccgtgtttccaaatataacaccagctcccgatgcagcccccatcaaagaatcgtaggaactatccggcagatctttcaagtctatgccttcttctctcatccaccttgcaagctccctcgtcgtgatgacatgatccatatctctcatatcttctgccccattacttacagctgatatgttcatctcgcctctgcgtatctcaaacttcttggctgtacacggagtcacggccacattgacgatcttggccgtgtcaagattattctgcttcgcaaaatacgtcttaatagtcggtccctgcattccgatagggctcttggcacttgatatatgtggaaggatctccgggtaaaatgtctcggcaaatttcacccacgccggacagcagcttgtaaactgcggcagcggctttgtcttttccgtaacgcgctctacaagttcagacgcctcttccatgatcgtcaggtctgcggcaaagttcgtatcgagcacatagtctgctccaagacttctaagcgcagccaccatcttgccttccacaaaactcccagccggatacccgaactcttcccccagtccgacccgcactgacggagacgtactgaaaataacgatcttctccggatcctccactgcctctttgacctttctgtactcatacacttccttgatcgaatccaccggacagacattggcgcactgaccgcaatgtacacatattgcagtgtcattcgtacttttcagatcataaagacggccgacggcaacttcccgctcacacacctgcctgcactgaccgcatttgatacacaggctttcctctcttctcactgctggattgtcagattctatgggaatcctgatttccgcaaattcgtgcttcattttttcacctcatcatttcaatattagtaactattattaatatagcatatatttccaacaaacgcaaggataaaaatatatattttaattatcggcaaatcttctttacttattaaaagtttaagacagcagatccatttttgtcacatgattgtcacaattttatcttatactaagtcagacagcagaaaaccactgttacactgcagcatattatagcaaacccgcgataaggagaaatatataaaatgaaattactcagaaatgtattcctggttctgctcctcttccttctgtctgcggccggctgcgtattttacgcattcaaaatagaaccttacagactgaagaccaatgaatacaccataaataaaacacaatctgattcaacgccggtaaaaataattcaaatttccgacttacacataaaagaagattttacatgtaagcgtctggaaaaagtagtaaataaagtgaacagccagaatcccgatatcatactgtttacaggtgatctgtacgataactacgcggcatacagcgatgatgaaaatataacagccgccttacaggaattaaaggcagcacatggtaagatcgcggtgtggggcaaccgcgactacggcggcggagcatccagacaatacgaatctatcatgcgggaggccggttttaccctgctgaaaaatgaaaatctgtccgtgacgctgaacgatcaaaaaaagatattgttcaccggcctggatgattctctgcttggtcgtcctctgatgccgtacactgccggatcagacgattcggattacagtatactgctgacccatgagccggacattatagatgaatatatggataataattatgatcttgtcttaagcgggcatagtcacggcggacagataaatattccttttctgccggctgttaatgaaaaagccgtagagacgaccgcgctttccacaagatacagcgggggaatgtatcatctgaaggaagacccggatacaacactgtatgttaacaccggaatcggaaccactcatatttcagccagattcggagtggtaccggaagtggcagtattttatgtcagtctataatagaaaaaacaaaagccgtaattttccgattcaaagaattacggcttttaactgcggatgacaggaattgaacctgcgtgtcgtgaacgctaaatcctaagtctcatttatcaggtattttatatacttcctgtcttttatgtatctttatctactaacaaatgctcaacaactgaactaaactttacagaaaatctcctgcttcatgcttcactacatatttatcataggcaatttcattttttaaggatctatatttgtaatacaaatttaatgtatatttttcttcatttactaaatataaaggtgccgcaatagttatcgcccagtttttttggtgcgaaagacgaacgttcccttaagcaggagctccagtattctccgggcagcggtgctttgggaatcgcaatcactacttttgtaggtcagaatttcggaaccagaaaaacagtccagggaaaggaaagtgcatgcgtgtgccttgaaatggatatcatcttttccgggatactcttattatttctgatacttggccgcatcctttgttccgtatcttcatgtctgatgagaatgtaataagaagaggtgctgaaatgcttgagcttatcatcccatgttatattttctttgtatttatagaagtattgtccggaactttgagagggattagcgatgttgtggtcctcttatcataacaatgtgcggtacatgcctgtttcgtattgtataggttattgtgtctatacggataacttcttccattgatacaatcatatatagttatccggttacctggataataaccgcttcttcctttatcatctattatctgtaccgcaaaaggaaaactggttgtcataaacaactgataccatcctttcatacaataaatatcaagttcattttctttacatcacacattaaaggcagaagcatacaaaccagcttctgcctaatgaacttttcctgttttaaggcttatctttttccctttttcttaatatgccaaaacaccccgcctattacagcaattgccgccgcgagagtgccaatgcacagacccacgggagctgtgtcaccagacttcacatttccacctgtaggatttcctgcagaacccagaccggactgtttatcggtctgatgatccacattggtgtcaggctgaccgtctgttcctcccggaggattggttgttcctggctttttgtcctgctttgtgagggtaaccggtatcttatataaatttagatctccaatagaaaccgccatttctgccttgtatgttccggctttcatcccttcctttaatccaaccaccgtattcttctgatctccggccgcaatgttcatcatctttgaacgtttggccttttccagtatctgcatcttgtccgcatcctgtccggacagctggcagttgacataggacaggtctacagttccattattctgtaatcccagctccgcctgcggcatggtcccctgggaagacaattcatttttatccaaacgaagaatcacttcaccggcaaatgctttaccgtcgatatcatactgatagattttgtccgcaatcttcacaagaacatcaaagacgtcatcctgcacgtagagtacaggtgtatccgtcatgaaaagattattaaagatatcatagctgacatttttttcactgagatctgccgcatgccagttctctccctgatctgcagagaaaatcacctcttttaaagccgggaatggataatccccatgtgacatcagcagcgggagactgatatccgtcttcttcaacgtctgattgtccgaatcttttaaaactccggtaaatcctttagcaacaccaaaaatggaatgatttaaagtcggcagcacggacccgctgatatcctgaaagtacacaaagctttcattaaaaacagcgaaatctcctgcttttaaactatctgcatagacgactgcctgatctgtgatcatcttcctggcagtcaatgtattcctgacgatcaaaatccctgatgtttctacatttacctgatcagctgtgacgtctccctctacagttaccacgcccgcctttaatatactgttgtctcccaaatgaatatctccagttatagttgaggtagctgctgtgtccagtttcagcacaacattatcctggccctcaatggcatttgcagtatatcccggcagcctctgcaaaacatcaccgtccaggacaatctcaacctctgccccctcctcaatctcaaccagcggctgtgttttatagtcctcatctccatataaaatcttccatgaatccagtgttgtcccttctgaaattgccaatttcttttgtaaaagagtgacagttccccggcccggctgttcaacctggattgtaccgtccgcattcttagaaatctttaacgctccattctttaatgaaaatgcaggagtctccagatccggcttcacggatacaggcgtcatacaattgtcctggtccgcactgcctgaatctacaaacgcatttgcacgaaaatcatagttataaccgtctctgtcctctgacagtgcaaagatactaacccggtatgtctgtgtctggtccgttcgattcatcagagcctttaagcttgctctccactgattatcattcacacgtttaaatattgcctgtgacatcacattactctgggggtctgccataacagcgatcaaagtccctttctggaaaacctccatctgcgttccggttagtgtgatcgtaaatacttcttccgactccacctctccttttatgtctacagtcatactctccacctgaggagctgccttctttacgacagctatcgaatgattcagcttaaactccctgccatttacattggcagacactgcatcaccctgaccaaacacagtgcggtagatcgttccgctgtccgttactgcttctatataattggagccgttaaatactgtaatatcctgtaatttaccgtcgccccccaccgttccttcaccggtgactgtattgtaaagagttttgatattgctctcttcatacctttgtgagactttataagtaatatgagtatccctaagaaacgccccctggtctccaataaattgaagagtcgttttcaccggacttacctttgtactactatatgttcctgaagtgatggtcccgccctgataatttattttggccacaatggactctgtggcaaaacatgtggcattgccgtttgtacctgttccgttcaatgttaatttggcttcatcctgtatggtgaattcacccacaccattcttgtaatactgataaatatctgtggaattctgatatccggagcctatggcagcagaataccccggttcctcagttgtgacctccgcctggtcctttaaggtgatggattcaaatcctaatgaagcgctttccacctgtccgctgcccacgtaattggctgcaccgatcgccgcacttccccatccacatgttgcagtgagcttcacggaacctccgatcacaatcctgccggccggctccccgtagtttcctccattttctgaattatagacagaaccgccgccaattccggcagctgaggagccctggattccggccgtacttacatttatggaaccggaacctgcaatcgtcacagacgccccctcttccacctgaatacctgcgcggtaagctccgcctgccaattcatttgtgccgcttacctctatggtaacctgtgcaccgtctttgatatgaacagccggcttacttgtctcagaattgttcgccccaggcgtggcatccttgttgggcgcttgtatggttacattgtttaactggagcgttggctgccctcctgatatgacaattgtattctgttctatgcttgttccggtaatactgaccgtctcattcgtgtttgtcaaatttaccgcatcggcggaaatatcataactgactgaggcactgcctgcggccagcacctggtatggccctgtctggacgcagctccaaaccagacatatacataataacaggatcttctttacccttctcttttttatcatctctgtccctgtctccttttgagaaaccctttcactttgtgacatgatgcatatccattatgaaaaacgcagtatcgtatccgcccccagcagctctatatcctcggactcatgggtaattgtgatcaatgttctcccttttatcattttccggatgtatgcggcagtcctatgcctgttatccctgtcaagccccttaaacggctcgtccatcatcacacagagacttggagacagcagcgccctaagtacagctactcttcggcacatgcctccgctcagctcccgcaccggttttcccaaagcagctgaaaggcccagctccgccagtgcttctttcagttcttcttccggccgccggctgcagaccattttcaagttggccatgacacttaagttttcacagagcctatcctcttggaatacagcgctcaaccggcctctggggaccccggtaacctcaccggagtctggctcctcgattcccatcagtatatgcagcagcgtagtctttccgcagccggacggacccatgatacaggagcttttcccttccgggaaggaaaaagacagaccttccagtaccggctgtccggaaaatgacttattcagattattgatatttatatccatacgctacatcctctcgactttttgcaccagccatctgatgccccctaaaaaacacttttcaaatacaaagctgatcatgacgattacaaccgtccacgcaaacagctccggcgtattcagataaattttagcatggtacagcttttcgcctatagacccgtcaggcacaccgatcacctctgcggccacacctgctttccagcataatccaagggcaagcgtacatgctgtcaaaaggtagggaagcagctgggagagatagatatagagaatcctccggccccatccaatagaaaatacagctgccatctcaagaagtttctcatctgtctgccggattccttccaatagattcgtatatatgacgggaagtacgatcaaaaacgagataaacacagataaatttctggacgggagccatatcagacacaaaatgataaaggatgccactggtatggatttgacagtaactatcaatggggtcagaagaatctcaataacagaaaatctgcatgccagcactgccagtatcatcccgagcacaagcgccagaaaaaagccggatatgatcctgacgaagctgtatcctaccgcctgccagaatcctaaggtgacagaaagcccggccagtttttgaagcacggaagcaggagacgccagaagtatctcctgtcccagcttcatactggctgcctgccagactccgagccagaaacagactgccagaacacgcgctgcatatctgcttatcctgctgccctgcttatttctcgtagtagaaatcatcatctggcaccgctcctccgatcgtctccggattctgcctgtttaaagtttcaagataaccggaaagcattgtcttcatctcttccccttttacaaacacaatgctgcagtccggtatcgccctgaacgccacttcttttgccacaatgtcatgtgaccctataatttccgccgcctcatccgggctttcatttacaaaatccacagacttttcatactgctccataaacttgtccacggcatccttgtgctcattcagaaattcatttcttacaatgaccacaccggtgaccagcctgcttccgtcagatattttgtcctcccacatctggttcagatccagagctatcttaagattctcattcttcatcagcgccgttgtaacaaacggctgagggagaagtcctgctgcggtcttgtctgctgcaagagcggctgctacctctgcatgttcagatttatactctatcgttacatcaatagaaggatcaagaccatttgcctccagcacagaattcaaggcatactccggcgttgcccccttcccgcttgcatagattgtctttcctcttagatcttcagcagactggatcgtatttccattttccacaagataaagaacacccagagtattcactgccagaacacttaccgccttatctgtcttctgatataatacggaggacagattagccgggacagccgcgatatctactttcccctgaacgaccattggaacaatctcatccggggaagccgaaatcgtaaacgtataattttcatcgtccagcatctgagccatgcccatagccgtaggtcctttcaaagcgcccacattcatcttgacgttctcctctgtctccgccctatttgaagcacatccaattagcactgccccgcacatacacacaacgagcagccatgccgccgccttttttaatttcatttccacacctgcctgtctattttttcctggtcattataacactttcacctgcatatatcagataattccagctttagagattattgtaacatgtatcgtatgaaaaagcagtggttatttccgaaaacagataaaatcaacagggatgaaaccaccaaaaaaaagctgcagccccctgatcaacaagagattacagcctttcaaaaaatgcggatgacaggaatcgaacctgcacggtctcccactagatcctaagtctagcgcgtctgccagttccgccacatccgcatataagttttgaaaacagaaaacggaccgtattttctgaacatcattcagaaaatgggaccgttttccagtgagcgtgcggggattcgaaccccggacaacttgattaaaagtcaagtgctctaccacctgagctacacgcccatacgtaacctgggctagctggattcgaaccagcgaatgcaggagtcaaagtcctgtgccttaccgcttggcgatagcccaataaaaaaaggtgggtaatgggactcgaacccatgatatccagaaccacaatctggcgcgctaaccaactgcaccatacccaccacatatattacctattgaactatagtgtccaactaagtaccactttattcaattgtgtggctctaacgagcctggggggattcgaaccctcgacctacggcttagaaggccgttgctctatccagctgagctacagactcacaaaccagctctttggaactgttttctctcaaagcctgaacacgcgatatcaaggctttaagaaagcgggtgatgggaatcgaacccacgtatctagcttggaaggctagtgttctaccattgaactacacccgcataaatatcggggtgacaggatttgaacctgcgacctcctggtcccaaaccaggcgctctagccaagctgagccacaccccgaaggtattctttttctgtcactttgcggcttttattccgctgtaccgccgtgacacaagagttattatatatgatggtctccagcttgtcaacatattttttccatttttttataaacagcttattacacaaattttatctcaaaatcagcatttcctttgtcatccattctcatgacgatgtagcttccttttctgccctcctgcctcggataggcaacactgcccggattgagcgtcaccagatcatcctcgaccgtgagcgcaggcctgtgtgtatgcccgtacatcacaatatccgcgccgcggcccctcgcctctgccttcagacgctcttccgacatgccgacataataataatgcccgtgggtgatgaacacatgactgccgccgataaagaactcctcttctctcggaagatcggagaaaaaatcattatttccgcttatcacatgaaaagggcagttaacgagggcgtttatataatcctctttcccttcagcgtcaccgagatgtatcagcatgtcaatatggccttcacgctccagcactgtctccagacttttatgagatttgtgtgtatcgcttacaattaatattttcatactaattcctcttatccctgcatcttactttcaatgaccgaacgcatcttccgcagtccctctcctctgtggctcagttcattctttttttccggtgagagctgcgcgctcgtcataccatattggggcaggaaaaaaatagggtcatatccgaaaccgttctcaccgattatctcatgtcctataatgccttccatcgtaccgcgcacgacctccctggtcccgtcaggaaatactgcggcgatcgcgcagacaaatcttgcagtgcgcctgtcgtccgccacaccgtccagccggttcagcaaggtctggttctttatgtcataggacgtattttcccccatatatctggcagaatatattcccggctctttattcaggtaatctatctcaagaccggaatcatccgcaagcactaccgcatccttatactgctctattccatgggcgatctctgctatctttcctgctttgatcatggcattttcttcaaatgtactgccgtcctccacgatatccgcagttatgccggcctctttctgtgacaggatctccatgcccagaccttccagtatcatacggatctccaccattttatgttcatttccagtagcaaatatcactctcttcatctgttggctttcctttcttcctgactgccaaaacgccttggaggcctcggcccgggaaactgataaaaataagtcttgagcatcccattataaatctttctgttcttgtcagcctttcttccaaagtaccgttctgcatcttcataggacgttatcatatatgcggaccatgaatccagcgtcctgaagctctcaccaaaagttctgtaaagctgcggcaggttttccttttcctccagccgttccccataaggcggattcgtgatgataaagccgtatttcttcggatgtctcaactctttcacatccctttgctggaagtggatcagatgctcaactcccgcctcggccgcattttgcctcgcgatcctgactacactgtcgtccacatcatatccctgaatatcaacttcaatgtcatcacgtattaagtcattcgcctcatttaccgcgtcataccacttcttcttcgcaataaggtttgtccagctttccgctgtaaaagaacggttcattcccggtgcgatattggccgccatcatggcggcctctatcggaaatgtaccgctgccgcagaatggatccacgagaatacgttccctgttccagggcgtcagcatgataagcgatgccgccagtgtctcggtgatcggcgccgttccggaaacctcacgatatcctctcttgtgcagcgacacaccggaagtatctattcctattgtaacaatatccttcattaaaaatacacggaccggataagacgcgccatcctccttgaaccactccgtatggtaatgctcctggagccgctttaccatggccttcttcataatagactgaatatccgaagggctgaacagcttacttttaacagaagctgcctttgctacccagaacttgccgtcttccggaataaactcctcccacgggagcgctcttgtcttctcaaataactcatcaaacgtaactgccttaaaagagcccgccttccataatatacgctcagcagtcctgaggaatatattagcccggcacaccgcctccgcgtctccgtagaacgtcacccttccgtcttccacacctgcgatctcataacccagatcttgtatttctctttttaatacagcctccagtccgaaatgacagggggcaatcaactcaactttatccataaatatctccaattttgttaatcttatcctcttatcttacttgttgtgtatacgttttgtcaattggggacggaggttttttaaaaaacctccgtccccaattagttttcccctgtcccctgcgggttatccacagaaaaggacgtaccctgtggatacgtcctttctgctcttcttacagactagtagttgttgctctcgttgctgctgttcttgttagaagaattctggtttgatgcattcttgtttgaagaattctggtttgatgcatttttgtttgatgcattctggtttgatgcatttctgttagatgcattctggttagaagcgttctggtttgatgcatttgaattgctgttagatgaattatagttctttgccatgttaattcctcctaatcaatctaatcaattttttgattacgagattattatgtccctattccaatcatttatgtaacatgtacaataaaaactaattttcatgttttattaattttatttgtataatctacatgtttcgtctattatcgtcgactctcgtcttttttgctcttttcgtttctgttatttctgaaactgtaacttattgtatacaattgaattgtaaggtcggtaggaggcatatggataaatcaagagctctattgttaaggctcgggatacggtctacattgaaaggtttctatttcctgctgtatgcgctgcagctgtgcttgtcaaacgatgagtatctgctttctgtctacaaaacactctatgttgatgtggccacacatttcggcacctccagggataatgtagagcactgtatccgtactgccatttctaactgctggtacaagggtaaccggaaacttctaatcaatattactgggtacgaacttaagcaaaaaccagcaaacggagaattcatagacattctctacaattatttaactcaggaaggatagcccgctgtgcgggctccttcttaagaccatcatattccaatttttggcaattttcacaaaaagcttccattttaagaattttttaatttttaacttgctttttaatggcctctatattatacttaatcatgtagaaaggatactttctacaaccccttattaattatttatactcccctcaaaagaccgatggctcccccatcggtcttttactttttccagtgttttccggtaatacacatctgaaactccacatgaagtccgtgcattacttacattaattggaaatcccggcagttaaaaccggcgatctgatctactgccggtcaaaatatatattctttcccgaggcatttaacggtataccgatccagaatgcctcaccttccacgtactgcatttcagcggctgcttttcccgccgaccacatcatacggttatccacattatcgccggatgccttcagcaccgctgaggaaagtgcaattcccagatcgagaaacagatgtgcgcagtttcctcctgccttcttacattcctcacagtttttaaaaccgcaaagagcacattgtccgacgccccggtaactctttctggcgccgatcaaaactaccgcctggcttttacgaacgttctccgcgtcccttccataccatacaaaagccttgtctttaaaataccgtactcccaattcctccatcttatcagccagcagattcttttcatatccggtcaaaacgagcgtaagaatctcgtctactcccttggcctttggtgcagtgcgtgcggcaacacacatttttgcggctgtatcaagcactcctctttcttccagcgttccactttgtaataacatagtttttctcctttccaattcgtgtatgtacactatttaaggtaaaaataagatcttacagcttttccgaaatctcaaaaagccaccggagattttcctttcccaaacgcgcctctatttcggactgcgctgattcccacagtggaatccccttgttcagagtctctttcccaagacttgtaagctgcagcttcttgtctcttctgcccttctctgatacatccttaataaatccccgttccgtcagcggttttaacgtacgtgtcaaagttgtcctctccaaaccaacataagcggcaagttcgctgatactgccggatcccaggcggcttaaattcattaataaagaaaactgatttacagtgatccctgtcggttcaagcgcactgtcgtaaaacgaagtaaccgcattggcagctctcctgatgccgatacagtaacaggtacctttgttgtgtttcatttttattgtcacgctcccgccccaaatagtgtatatacactatatcagaattatgcttaactgtcaacccgtttactatttacactgtcacaattaaatctatatccctgccgcataaaaaaagaggggaaactcccctctcaccttctccgccctatgagacgaactaccagcatcactactatgatcggcatgatcaacggcatgagcagactgaaaatgcctccgataaccgctacgacgatcagtaccactccgataataccaagtacaagcaacagcttcttccaccacgaatcaaagccgaacacatgaacacttccggcgcccgctccatactcccggccgccgctctgtctccctgacgcttcttttgcctcatacccgccgcgtgcttccgcggtattttcggccacatcgatgagagaacgggcaatgacccacggatcgccaagctcaccgaccacttctgcctccgtccttccttttctcatttcttccattatataagaactgtaataagcaacgttatcctgaacggccgaaccgctcaattcattctccagcgcattccgaagcttatccaggaactcattctgcgtcatttgttaatcctccttacatcaccctgtaaataaaagaaccttgaacctagaataacatatataaactgccattccaagcccaaggtccttaaatttttctaatcaatttctaaagaatcagacttcaaaaatcaaatctccgtaagaaggcatcggccacgcttccttgtctacgatcatctccagctcatcgacaggtttgcggagcgcctccatagccggcacaacgtcagaatgacaatattccgcctgctgttttccctcttccatatctgaggctttgtccgctgccagaatgagcgcctccagcgctttcttcgtctccgccagcaatcccgatacttccgtgagcagccctgcctgtacggacatatccgcccccgcctcttttaccgccacaacggtatctgccagactcttcgtatatctgatcacagccgggatgatctgtttgctcgccatatctatcatcgttcgcgcttctatattaatagccttcgagtagttctcatactttatctccgcgcgggattcaagctccgccctcgtaaatacattgaaccgctcaaacatactgacagacttctctgtcgtcagcgccggaatcgcctcaaccatggagctaatatttggaagcccccttctggccgcttcttctacccaggcctgcgcatatccgttgccgttaaatacgatgcggtgatgctctatcgcatactgcttgatcagatcgtgaactgccatctcaaagtcatccgccttctcaagaatatcacacgcctcactgaacgcctcggcaacgatcgtattgatgactacattcggccctgcaacggaatcgcgggagcccaccatacggaattcaaatttatttcctgtaaatgcaaacggagaggttctgtttcggtccgtcgcgtctttcgcaaggtcaggcagcgttctcacaccggtctccagcttgccgcccttcaaactgtgggttgcctccccggtgcttataagctgctgaagcacgtcttcaagctgctcgcccaagaagacagagataatggccggcggcgcctcatttgccccaaggcggtggtcatttcccggatcggcggcagattcacgcagaaggtctgcatgctcatccactgctttgaggatacacgtaagcacgagaagaaactgtatgttttcatgtggtgttttacccggttccagcaggttccttccgtcgtctgtcgtaatagaccagttgtcatgctttccggaaccgttcacacctgcaaacggtttctcatggagcaggcacttcatcccatgcctgcccgctacacgctttaacgtctgcatcacaagatgattgtggtcaaccgcgatattggccggtgcatagatcggggccagttcatgctgcgccggggccacctcattgtgctgcgtcttcgccgttacacctacccgccacaattcttcatttgtatccttcataaatccggcgatcctctgacggatcgtgccgaagtaatgatcatccagctcctggcctttcggaggcatcgctccaaaaagcgtgcgaccggtatatatcagatccttcctgagacggaacttctcagcgtcaacgagaaaatattcctgctccgctcccacggaaggagtcacctttttcgctgtcgtgtttccaaacagacggacaagcctcagcgcctgttcactgatgacttccatagaacgaagcagcggcgttttctggtcaagcgcctcccctgtataggaacagaaagcagtcggtatacagagcgtcgcccccgcagcgtcatgccggacaaaggccggagacgtacagtcccacgcagtgtaacctctcgcctcaaatgtagcccgcagtccgccggacgggaaggaggatgcatccggctcacctttgatcaattcttttccggaaaagctcatcaatacttttccgttgtcaagcggagccgatataaaagaatcgtgcttttcggccgtaacgcccgtaagcggctggaaccagtgtgtataatgagtggcccccttttcaatcgcccattccttcatctcatgcgcaatgacatccgccgttgcaagatccaactctttgccttcttcgatcgtcttcttcagatccttatagactttcttaggcaaacgttccagcatgacagtgtcattaaacacatcttctccaaaaatttcagctacgttaattgcttcgctcatattttctgtttcctttcttgtgttaaatcctgttacaacagggagtctcatattccgtctcccggaaatttgtgcggtacacggcgcagaaacctctgtcacccgcatcacatagaaaaaggcactccaacaccggttggaacgcctttgttcatttctacgtctgctagtatacctcaatcagccgaaaaaggcaagtaaaaattacattctgtgacttaagcttttccaactgaaccgaataattccatcttttccttaacagtctgcataatggcatccgtacccggtttcaacagcttacgtgggtcatagcctttaccttctaagtctttacctgcttcgatatatttacgtgtcgcgtctgcaaatgataactgacagtctgtatttacattgatctttgccacgccaaggtcgatcgccttcttgaccatgtcgtccgggatcccggttccgccgtgaagtacgagaggcattttgcctgtaagctgctggatcgcgtccagtgtctcaaagcttaatcccgcccagttctccggatattttccgtgaatatttccgattcctgccgcgagcatgtctacaccaaggtcagcgatcatcttgcattcctgcgggtccgcacattcgccctgtccgataacaccgtcttcctcaccgccgatggcgcccacttccgcttcgatggacattcccttttccttacagatagcgatcagttcttttgtcttagcaacattttcctcgatcggatatttggagccgtcaaacatgatagaagtaaatcctgcgtcgatacatttcagacatccctcatagctgccgtggtcaagatgtgttgcgacaggaattgtgatcccgagtccgtcgatcatctctttcaccattgcctgtacagtcttaaagcctgtcatatatttccccgcgccctcggacacgcccagaattaccggtgatttacactcctctgctgtgagcaggaccgcttttgtccattccaggttgttaatattaaactgacctaccgcatagtggcccgctaccgctttttcaagcatctcttttgctgatactaacatatattattcctccaattcctacactatggcagctcgccgccgacatataatgtaattgtttcgcttttaacattatatctcataacccttaaaaacacaataatgtttaccaataaaagcagtacactttttaatccgtccgggaactattgtcaagctttgcaccgcatgactcccggataataagttttgtctgaaaataaatcttctgcggcgctcccgctccgtgctgaatgcggtcgatcaaaagctctgcggctttctgccctatctctctgcagggctgggcaaccgtagtcagaccaggatgaaacaatgccgcccactcacagtcgtcaaaagccgcgaccgccatatcctccggcactttgatgccaagactgtcaagcgccttcatgactccgagcaccatcagattatttgcagctatgatcgccgtcggacgatccgcctgccttgccatcttccggacaatgtccttcgtgcgtatctcggtgggaacagttctggactctccttcgatcacaagtgatccgtcgtaagggatgccatacttcgccagagaattttggtatcctctgatccgttcctcggtcgtactgatattgcgcagtccagcgacaaaagcgatccgcctgtgcccgagggagatcagatgatccgtcagcttttccatggatttttcattctcactgccgacccagtcaccattgccccccagcatccggtcgatataaacgaccggtatgtccttctcctcaaaatactttccgacgtatttctcagattcggctgtcggagacagaatgaacccgtccacgcagcgctcacaaaaagactggacgatctccagctctcttttcggatcatcgttggaatctgccaggaaaacggtataattgttcagaatgcacgcatcgctgatcgccttgatgacatcaataaagtactggttctggatatcagatatcacaagccctatcgtcctcgtctccgactttttcagagccttcgccaccagattgggcgtgtagcccgtctcctcgatcaccttcaatatcttatcctttgttctgtcgcttacatgcttcgtgtcattcagcacatgggagaccgttgactttgaaacgtttgcaattctagccacatcgccaatcgtcactttacttccgttgcttttctgcattttttcatctcttatttctttttaatttcagaccttaaatttaggatatcattaactattttgtttgtcaattaatggtaaaacactgtgtctgcggcatggcagccgcccatagggcagggatctatttaagctcaacaaactcgatcttcacgcggtccggcccatataccataatacatctgcaggacttcggtctccacgcttctgtcgtcgagacacccggtattgcaaacggaactcccttctcttccagaactttcttcgtcttgtcaagatcatccacaagaagcgcaaaatgatctatattaccgtctcctttagtgcccgcctggcttctgaccgtttcatccagtgactgcggaagtccgatgatcaccccgccgcactccatgaatataaaattattgccctccattccctcttgatctacaatgatctgaaatcccagatcctgataaaacgcaatgcttttctccagatcagatgtaggaattccaatgtgggcaagtccttttacttctatattattactcaacttctcttcctcccgcatccgcattcgtccccaagcttatataagtctgaggcatttttccagaggatatcctccttttgttcttcgctgatcttacactctttaatatctgatggcagcgttccctctcccgcaaacaatatttttttcgatccaagaatagaaacggcatgctcgatccagcggtggatgtctaccggtggaaactgtctggccgcataatggcgcagccatgccgtgtcaaagtaagcgttctcaaatctttcagtcagacagagaaattctcggtaaaaatttccgccgaaatgcgcaaagatgatcttcagtttcggataacgctccagaaccgcggcaaactgatgtggaaacccgatacattcatattttggcgtttttatcttccccggttcgtctgacggccaagtgctgaatgtcacgattccattgtgaaacagcagcggaatgtccagttcgaggcatgtctcatacagcggatccagcatcgggtcatccacaacataatcttcaacatatggatgcatcttgatacccctgacaacacctttcccgacattatccctcagctccttcagggaattctccatatcatggacgttcacataaccaatgccaaacagcttatcgccatattttcctacactttccagcattgccgcgttttccgcctttgtcgttgcaatgcaggaacaacggtctaccttctgttcttccatatactggaataacggtttgtcgtcataatcaataaacttatctaaaaaaaatacatgtgcatgtgtgtcaattaccatttattctacctccttcaaatcctgtcccgcttctttgtccacgatcaccgtacagtccccgtgcagtctgaggatacttgcaggcagtgccggcgtgatatctccgtataccatcttccggatgatatctctttttccggaaccatttgcgagaagaatgattttctttgcggacataacattctttatccccatagttacggcttcccgcggcacctcctccggcgaagtgaaaaatctggcgtttgcccgtatcgtttctcctgtcagctctgcgacgttcaccgcttcggtgaaatgatccgaaggttcattaaagcctatatggccgttgccgccaattcccagaacctgtatgtctgccggtccgagtcttctaagctgcgcttcatattcttctgctattgcgccgaaatccccctctgtgctcttcggaaaatgtatattatctttcttaatgtttacctgtccgaaaaagtgagtatccataaaataacgaaaactctgaggatggcttcccgaaagtcctgcgtattcatccaggttcgctgttctgactcctgaaaaatccacctttccctcctcatacatgcgcacgagctgttcatacatgccggccggagtcgatccggtcgccagcccgagaacactttccggtttttcccgaacctgctccgctataatctgcgccgcccattggctcatctgtccgtaatcatctgcaacaatcactttcatttggcatcccccctcccttctcacatatttcctccagagtaggcaggctgtcgatcgccccatatctctgtaccgcgatggtgcttgcccgtaccgcaaaatcaaccgcattcgcgtagaactcttctgcttccatcttctctgcaaacgccccataatagtataaaaatgcagacataaatgaatcgccgcctccggtcacgtcgactgcctccaccgcttccggccttcggcttacactcagcttccccgcatagacagacgccgtctccgctccgtcagtcacgagtacgatcttatcttcctccgctgccagcttccggggattcagccgtaagatttctgcctcttccttcgtaagcttaatgatatcactcacacgtaccagctccctgcaccgacttatcatctcatcccgggaatcccatgaaccaggacgtaaattcacatccagagaggtcgtcatccctttttccctggcccttctgatcgccctgcccatacattcactcgaagttttctccgccataccaagacttccataatgcaggatctttgcattgtcaaataactctgtaggaatatcttcaaatgtcagcgccccgtccgcactctccttcctgtagatcgcataacgcgtcatgtcctccgaacggggcatcacgacggttacggttgtgacacggcgtcggtctgtctgaatataagaagtatctacgccgcattctcctgccgtgtctatgacgcatcttcccagggcgtcatcccccacccttgcaagcagcgctacccttgcgccgagctttccaagaccgcacgccacattattcggcgcccctccggcaagtgctctgtaaggacccggaactctgttttcttccggcacaaaatccacaagtgcttctcccattgtcaaaacatcatattttttcatcataccttacctgcattccatcttaaaagccattttaaaataaccgcaactgccttctccaccacaactgccagaatcaggatccaaatgattcccactacaacgagatccgtggacaaaatcgcaataaatgcatttaagattctgccgactccgctctttgccccgagcaattcgcctacgatcacaagtccccaggaccagctgcacgcaactttgatggggcctgccatcgacggcaggagacttggcagcaatacgcggtacgcaaccgtcgtcctgccggccccaagcgttcttgcaaaatcagcctgtaccgggtccagcctcttaagcgcttccgcgccggccacaaatatcattgtaaatacatagaaaataacgatcccaatgatccctccctggctcgtaccgaaccagagaaggaaaaaaggagcaagggccagcggcggtatggcacgcaaaatatcgacgagcggatcaaatatttcctgaaaacttctaaatctggacgtcagaaacagacagataaaggcgactgctgttcctgccagcgtcccgagcagatatcgtcccagggtagccatcacatgtgtagaaaagccactgctcccggctccctgaaactggatctccggactctctgtaattgtcccggcaaaccggctcacgatcttccacggggacgggactcttgtctctcccagcgaaaaacttgcccagatccatacggcaaacaatatcataatgccgagcgccgccaaaaaaatgttttgtttctttgtcatctttttatccatgtctgtcccctatttcatttcttttacggcctgttccgagagattcctggcatccagataattgaaaatagaatactgatactccgctttctctttcagctccagcgccgtgccgtctgcattttccagtttttcaaagttagaatctgcttctgctttcagttcctttaactccgcataaatcttatccgcgcttacgatgtctgacgggccgtactctccgcttttaaacattccctcatcctcgtacatcttgatcgttgaaccaatctcatactcccagtacagggcatcttccttatcttcaaaccaaggcttctgcatatcccatgtatataacggaatggaagttttatataatgcctgtacttcttcctccgtgaactcggtgccggccagctggttcacataattcacgtggatcttggctgcctctttaggatcatcattgacatattggttgatcctgaagcatacagacgcaagcctcagcaccgtatcgtgattttcttccgcccatttttctgtcgttgtccatccattgtgcagaatgcttctcacttcctttgagtcctcagaaggctctgcagtctccacgatatccttggcagaaagaatcggtacgaatcccttggaagataaggttgcggctgccggcacgccgccgaccttaaagtctgctcttcccgcaagcataagcgctaccccgttggaatcatcgatcacttcattttctacgtcatccagcgtcatgcctgctttctgaaagcacaggtcaataaacggtttgatagctgattcggacggataggtaaatacttttcctttcatctgtccaaggacagccttgatagcttcctccccgctcatgccttctttgacaaaatcactgtatgtctttgttccctcgggtgccataacactgtagccgaggaacaggttgctgaaagcaaatgtcgtaaagtcgccctgccccatagacggaataaagagggacggtgcccctgaggcaaaatcatagttgcctgcgatcagaacagaaggtactttatctgcatcaatggcatctactttctccagtgtaataccaacgtcctcaaaaaactttttttcgatgcccacatacggaacggtatggtccggatatggttctgtcgcgaatttcagactcacctgagggattccggctccggttttcccttccgcgcttttgcttttgtcgctgccgcctgaacagccggccagcgtcaatgccgccgtcattatgagacatacggttactcttatcatctttttcatatttttcctccttctcctcatgcatcatggcatccatcgtgttatcctgtttcctgtcacttttacaatccagccgaaaattgctgtaagaacaatgaaaacgatcaatattatgagcatcctgcccgtttccatatactgctgtgatacgatcagcagccttccgagaccgtcctgagccgccagaaattctcctcccagcgcaatggcccatgctacccctagcgctacctttgtagcatttataatgttgggcacgatcatcggtattatgacattcgtatatacatccatatttttagctccaagcgttctcgcaaaattgatccggatccggtctgtattatcaatggcttctataatgtttgtcgtatatatgatccagagtccaaatgcgatatatactatgatcccgatctcttccccgccgaaccagacgaggaacagcgctatcagcgccagaagcgggatatttctcaatatcttcacgaccggatagaacattcctctcagtacgggctgcagtccgatgatgatccccgtgacgacaccggctgctccgccgatgaaaagccctgtcaccacgcgctttaccgtgatcaggctgttgctcacaaggacgtacagcgcatccgcatagttcggcagcgcgcctcccctgaatgccgcaaacccgggcagtgattcagtgaggacctttccccatgtcggcacgagtaccgcgctgtattccccgccgcttcgggcgatcagggcagctatctgccagaaaactatcagtccggctgccgccagaatcttttttatatgttttgtacccattaccgcacctcactctttacatcgctcagctccagcaatttcccgagcagatagtccgagattgcgtgaaactctgctgtattgcgtatttcaaccggccttggcctcggtatgtctactttgagttcctccacgatttttcccttttcaatcataataatgcggtcggccacaaatgtcgcttcctccacatcatgtgtcacaaagaatgtggtgagcggattcttcagccgtatcttctccacctccacctgaagctccaccttcgtcgcataatcgagcggcccgaacggctcgtccatgagaagcagttttggctgatttgccaggaccattgcaatctgaagccgcttgcgcatgccgcccgaaagctcctttggatagaacttcgcgaacttttccagatttaccattttaaggtattttattatcagctgcccgcgctcttcttttggcactccgcccagcttcaacgcaaagtcgacattatctcctacccgcttccacccaaatacagcgtccgcctggaatactactccacgctccctgcccggtcccgtgatctcttttccgttcagcctgcacgtcccgcctgtcggttccagcagacccgcaacgatattcagaagtgtcgtcttcccgcatccgcttctgccgacgacagctacgagttctccgtgggccacatcgagggatatatcatccagcgccttcatcttatccccgctcaccgtattaaattcaatgctgacatgttcaatattcagttctccgctttgtgtcttcttttctacttcgcccatattcatcgcgcaacctcaatcttctcaattcctaataattttgcaatatttccgcccagtatcagttctctgtcctcttcgttgtccacaaatacatccaggatcttatcttttattccaggtatgccgagagggccgtccgttcctattgtaaatttgccggccccgcactgcctgtatgcctccgaaacagaataaggccccagattgccggtcaagtccagaagcagattgtcatatgacggtgcgatctctccggtcgtaccgtaacaccaaatgaatccggaatggatcatgagaaagaccagtttcgggaaatccttggcaacctctgccacctgcagcgcagtcgtattgccgctgtccccggcgccatgcaccacgaccgggagaacccttcccgtacgttcctgcagttccctcagcttgttcagcatcggatacacgaccgtcttattattgatctcatagttatgtgccgccggattcatccgcagccctttcagcccgagatccacgatacagcgctccagctctcttgacgactcatctgccaccgggagtgtaaacggtctccccgcctcgtccggcggatagttccatgtcttcggcgcatcattccacgggttgacagtggcaaggcctatcactctctccggaaacatgtcctggatcttcgcgacataatcgttgcctatgtatggattccactttggtgtctgatgggcgaagccctcatctgcctgaaagactatctgtatatcgattccgttctcatccatccacggaatcaaatcttcttccgcaacgcaggtgctcttcatattcacaccgatcttaaaatttgtatcaattaccggccagcgatattttcccacggttctcttccctcctgttcctcatattttatctttggtattcccaggtattctgccatgtttccgcccatgaccagttccactgcctcctcgtcgtcctctccggtcaggtctctgacaatgagccgctttgtcgtcgcaaggtcgaatggaccgtctgtgccgatcacgaattttccggctccttctttttcatatgtcggttttaaagttgtcggggtgacattcagcgtcaggtccagcttcagattatcgatgccttccgccacatctcccgcggttccaaatgctctcatatatcccgcatgagccatgaggaacaaaatgtccggaaagtctgcggcgacctgtgccagctgagtcggagtattattcacagaatctccggcacagtgcactacaacaaacaatttccttccgcatttttcctgaagcctggtcagcttttccatgatcggatatataatactcttattattgatctcaaaatcatgttccagcggatgtaattttatgccccacaggcctaattccagaatagaacgctcaagctcctccaaggcttcgtctctgatcggcagatccatctcctttccgtactttgacttcggccagttataagtctttggggcctgaagccatggattgatcgtacacagacctatcactctgtcagggaatttgtgctggattctgctgatataatcatttcctatgtacgggttccaatccggtgtcttatggacaaacccttcattcacctgaaaaatcacctggatatccacgccgtttttgtccatccatggaatcagttctttctccgcgtcaaatgtgttgatgagacacactcctgtgtgatagtgcgtgtcaattaccggccatcgttctttcaccatttcttcactccttctttttttaatttatctttcagcagtatgccgcacgattcccgtatctctaaccggggataatattccaccttctgcagcgctgctgttggattcttaattctctctatgagcagctgtaccgcttttgtgccaatatcccggcacggctgcacgattgttgtaatacgcggttgaaacaggtcggcccactcaaaatcatcaaatgccgcaagcgccatatcttccggaaccttaacattaagctcctgcaatgtgcgcataattccaatgaccatgaggttgttggacgcgatgatcgccgtcggaaaattctccgtatttaatatggctttaaaacgttcttttgacctgactttagccggaacaatcctggattccccaacgatcaggagcgtcttgtcaaacgggagccctgcctcttttaatgcactctcatacccttcgatccgctcctccgttgtgttgattcccctgagcccggagacaaacgcgatcctgcggtgccccagcccgatcaggtggcgggtcagtatctttgccgcattccggttttctgtccctacccagtcccacttgtcgtccagcgttctgtcaatacaaactgcaggcagattcacactgttcaggtacggcgccgcataatttccggaatggatcgtcggcgaaaagatcagaccatctatacatctttcctgaaatgactttaccagctccagttcctgtttcggattatcgtccgaatcaccgaggattaccatatatccgtttcgcagtgcttcttcatttactgcctgtatcacatccacgaaaaactggtttgtaatatcggagacgatcaaacctattgtcttcgtttcactttttttcagcgcctttgctacataattgggagtgtaacccgtttcattgataatacctgccaccttcagtctcgtacggtcactgacactctttgtaccgttaattacatgtgacaccgtggaagtagatacattggccatttttgctatttggctgatcgtgattttgctttcctttttactcattctttccggttccgtttctttggtaaatcgtttcgctacaatctcaaaaaaaattaaaaaatattatatttagttttatgttaatatacatatttacagtatattttgtatgtttttaacaatacaaaaattggcgaaacgtttttcttttgttttataatatcatctgatacgcttattgtcaatattcttttctgtaaattaaaaattgcgctttcatcttacagttaccaacatttaattctgttatttttagattacaaacaacaataaaagtgtctgtttaaactgaacgacaccccttaagtttgatttccagcttaaggggtgccatttggttccaatatcttttaactgtcaattacggagtaaacataaagtatccccggacagagtcggatgtaggtctatatgaatatccgctaagatcctgcagcacgacatcacctgatgcaagcgccgctgctctgtatattgctttagaattagagtttaattcatagttttaatcaacacaacatctgccgtaaatgtttctggtgtattcgctgccgttgatgagaatggtattatgatccttccttcactcatgacagcagcgccacaaagagtcgccgcatgcgcagcatatgcactcactgataatacactgtagccttcaggtatggcaaaattaatataagtgtatgactgctgtccggccgatacattaatgcggttccccacagtcctcttaataatatgatcattcagagcgctgtttactgtatccaacagcactttaccctgccgggcatcaagggcgtaaccttcctctgtcgtttcaagattgttggccatattcaccgggccggccggtcccacaggtccgcggtctcccttatcgcctttctctcccttctcgccctgcggcccctgctctcctgcagtaccggcatctcctttgtcgcctttcggcccctgcgggcccgcggctcccggatctccctttggacccgtggcaccggttggcccctgcgggcctgctgctcctgtgtctcctttgggtcctgtggctccctgcggaccggcagctcccgtcggcccctggggaccggtcagtccctgcggccccgtagctccctgaggacctgtggcgccggtcagtccctgaggccccatcgggcctgcctcacccttctcacccttcgggccggtggccggcactccggtgtcatagttgttgataaaccagttcccattttcaccgatataaatttccggtataaagcttgtgttttcttccattttttgttcctccttattatctgtttgctgtattttagcagcagcgtgcgggacaaagagggacatagataaatatatttttaattttgcttaacactgcgctttatgcatcttgattttacgcctgatccccggtatgctttagcggacacaaaaacaggagccttccggctccatgcttaatttctatataaaaagtctactgtaaaacctgaacagtacggacagcgtcctcttcacatatcagggcaaaaaaaatccgctgaacctctgtatttaaagagattcagcggaaaatccaagtgactccaaggggaatcgaacccctgattccagcgtgagaggctagcgtcttaaccgcttgaccatggagccattatttcacctgcctgtctattgtagcaaaaaaaatcacaatagacaagcattttttttagaaatttaaaatttatttcattatcatacttatatacccctgaataaagatcacgaacacgataagaggaaggataaacgtcagataaaacctgacaccccggccggacggaaacttcattcccgctcctgcgttggcttccttgaggaagctgtcccatccccatccgtaccttgtcacacagaacagcagatacaccatggacccaagtggaagcaggttattactcacaataaagtcctctatgtccataatgttctttccgcctattgtaaacgaggaccagtccgtcatcccgagtacacacggaatactgagcagtatgagaagaaccccgttcacaatcacagaacgtctgaggggccagtcccacaagtcgcgcgcaaactggattatattctggaataccgcaacaattgtggagagcgccgcaaaggtcatgaacagaaagaacaggctgccccacactctcccgcccggcatctcccggaatacattcggtagcgtcacgaatacaagccccgggccttccccgggatttaagtcaaaggcaaagcacgcagggaaaataacaagtcccgccacgaccgccacaaaggtatccagcgcggtgatacttacagcttcgcccgcaaggctccgctctttaccgatgtaactgccgaatatggcaagtgaaccgacgccgacactcagggtgaagaacgcctgacccatagccgcaaaaaccgcttcctttatccctgcctcctccattttcccaaaatcgggaagcagatagaacttcagcccgtccgccgcatttggaagcgtcacggcacgtatgacaagcacgatcatgatgacaagaaggctggacatcatcacttttgtgatcagctccacacccttctgaagtcccatggagcagatcagaagcgccgccacagaaatgagaaccatccagaaaagcattccgttccggtcagacgtaagtgcagtaaataccccttctacctgcgccgtatccgccccttcaaagtcgcccttcagcattttgacaaaataagcgagcatccatcctccgatcgtcgtgtagaacatcatgagcagatagtttcctgccatggaaaaatagcggaagacgtgccacttgctcccggccggttccagcgcgttgaacgacatggcagaacttttctggcttcctcttcctaccgacagttccatgactacgatcggaagtcccaatatgacaaggaagaacagatacatgagtacaaatgctcctccgccgtattttcctgtgatataagggaagcgccaaacattgcccagaccgatggcacagcccgctgagatcagtataaatcccaatctcgaagaaaacttttctcttttttccatttgtcagttcctctgttatttctcttccagctgtttatcttccagctgtttctttcccaactgtttctcttccagaagatattcctccggattctgcatcagttccctgatatgctcttccggcaccatgatctcaagctgcctgttcaggttctgaacttccactctgtcatgaatgcctccgaattccccgtccagcgtccacggtatctcctccagagattcaaacacaatattgcctgtcttgaaagaatacatgtgcttcgtgtccacctgctcgatcagaagggccgccactatttcctgaagctccagcggattcttcggcatcttgatcaacgtcacttcaaacacgccgtcgtcaaagaccacctgctttccgatcatattccggaagccgcccacggatctggagttcgtcaccatcccgaatatgaattcatcctctatagtttcgccgtcatgtgtgactttaatacggtatgacggcacgttgaacagtctctttgtcccttccagcacataggcaagatgcccgagaacattcttcacctcctgctttgtctggtatgatacgtcggtaaagagtccaaatgcagcgatatatacgaagacgtcgtcattaaacctgccgacatcacacggaaacacagcgccgtttaccgcattgtccgcagcacttaacagccctttcggtatatggaggctgttggcaaagtcgttcgtagtaccggtcggaatgtacccgataggagtccggtcgccgcgctgcatcattcccgtcactacttcatcgatcgtgccgtctcctccgctgcacacgacgagatcataagagccgaactcatactgcaccacttttttatacgcgtcccggtatgcctgcgtaggatatgcgaccacctcataacctgcctttacaaaaatatcgatgacatctgaaagtttgggcttaagcagccccttcccagcatgcggattatagataaataatagtcgtctcataagccctccctttttcctgcgtataaaaagggcattttcatgcccttctcatgtatgcctcgttaaacatttccatttaacaggtatgtatttttattttttgtcagaaaggaataactccagcccttttgccgcttcctcttcatccttgccctctgcaaccactgtaagttcctctccctgacataacctgagggtcatcattcccatgatactcttggcattaatctttttctcttcaacctcgaagaatacctggctctgatactggcttgcttcctgcacaagcagcgccaccgatctgtcttcagtactcatgtccgtttggatagttacaggtttcttaatcataatgttcctccttactgttcccttaacttatcagctatctcacttaactttcgcagccggtggtttactcctgatttgccaagaggctcccggagcagattccccagctctttcaaagttgcctccggatattcaagacgtgtaagggcaacgtctctcagtccctctggcagcttgtcaaaaccgacggtttcctttatataagaaatatcctccatctgccttacggcagcagatacggttttattgatattcgcagtctcgcagttcaccttccggttcaccgagttgcgcatttccttcagtatcctcacattctccagctccatcagcgcgatatgcgcctccatgacgttcaatatatctacgatctgtgagccttccttcagatacactacaaaggtcttttttctcggtacgatctttgcatccatgtcaaagctgttgataatatcccgcaggtgaaccgctcttgcctcgtcaccgcacacgatctcaaaatgataagacttgctcgggtcactcatggacccggccgcgagaaaagctccccgtatgtatgagcgcttgcagcagacagcctgcgcagatgcgtttttgaccgccagcagttctttccctcttgcatggataaaataactgctgctgtccctgcccgtatttctccggacagcgatatcagttcttatattaaatgttttttcaattaatgtaaagcactttcttgcaacagcgatattttcagtgtgtactccgagactgcacgttccgcctgcatcctcctgaaatccgccgcacatatgcacgatcgcagacagttccgcaagactgcagtgccgtgctttggcgtaatgcctggataattcttcttttatatttcctgaaaatgacatctgactctccttagacctctgtccgtataaggcgatcatctggcctttgtgacagcatcctttccgatatcccggtgttcgatccgtatgccgtacacttccgtgtctttaagctgttcaaacagttcgtttgccagcgttacggaccggtgctttccgcccgtgcatccgataccgatgacgagctgcgtcttgccttccgcgatataattaggtatgaggaactctaccatatccagcagcttttcgagaaatttcttcgctttgtcattgttcatgacatagtccctgacttcccggtcattgccgctcttggaacgcagttcttctatataatacgggttcggcagaaagcgtacatcaaatacgagatctgcatcatttgggatcccatatttgaatccaaaggataaaaccgatatataaagattcttatattctttgttctggacaaatatcttattcagctccgccttcagttctcttgtgagcatatggctcgtgtccacgagatagtccgccctcttttttaaaaatttaagctgttctctctccctctgtattccctggtcgactctgctgtcgtttccggacagggggtggaatcttctcgtctctttataccgcttgacaagcacgttatcacttgattccagaaaaagtatctcgtactttaagccggtcatatccagttcatcgagcactttctccagttctcggaagctctggccgcttcggatatccacgccgagcgccgccttatttatctctgtccccggaacccgcagcagatccgccatcttcgggatcaacggcacaggaaggttgtcgacgcagaaatagcccacatcctccagcatcttaagcgccgtactctttccggctcctgacattccggtaactataacaaatctcatcttagaactctcctaatcttttcacttccggttccatccgtacaccggtctgtctctctacccggtctgcgacctcggtaatcagcgccataatgtcggccgctgtggcactgcccctgtttatcacaaacccgcagtgtttctcggacacctgggcgccccccacacggaagccgcgcagcccggcatcctcgatcagtttgcccgcaaaatatccttccggtcttttgaacgtactcccggcgctcggatattcgagcggctgtctggtcactctcttttctttcagctcatccattctggcttttatctcgtctttactgccctccttaagctctatttcagcttccagcgcaatatatccttttctggcaatgacgctcgtcctgtagccaagttccagttcgtctctgtggagcgtgagaaacgctccgtcttctgtgagaactgtaacgtatctcagtacatccttcatctctccgccgtatgctcccgcattcatcacgcaggcgcctccgagcgtcccggggatccccgcggcaaattcaaatcctgtaagtcccgccgacagcgcccgggctgcgatcgatgataaaagtgctccggcctgggccctgactgtatgtccctctaccgttatttcactcatatctctgtatatctgtatcatgactccgcggtatcctttgtccgatacaagcaggttgctcccgttgcctataatatagaaaggaacgtcccactgtctgcacaggcggataatatctcttacttcctcctttgactccggaaccgtataataatctgccgccccgccgacgcggaaggtcgtgtggttcttcatcggttcatccgccagcactttatcttctgtcaaaacatccttcaatgcattgtaaaaatcttgattcatatgtgtctccatcttatatttttatattaaatcatattaattttctcagtacatcatacactatctacctgccaaattcaacgcagacttgcaaaaacagggaaaatgggttatattagtcccatataatctattttaaaaaggagtgaacttatcattggactcgagtgacgtcatacagctaataatactggttgttttactgggattgtctgcatttttctcatctgcggagacatctcttacgacagccaacaagattcgaatccgcagcctggccgaggacggcagtaaacgggctaaaacattattaaaaataacagacaattcaggaaagatgctgagcgcgatactgatcggcaacaacatcgtcaacttatccgccgcttcgcttacgacaagccttgcatacagcttcggcggctctatggtggcgatcgccagcggtatactgaccgtattgatccttctcttcggtgagataacgccaaagacgatggcaaccatccacgctgaaaaaatggcgcttatctacgcccccatcatcagcatgttcatgaagatcatgacacctgtcattttccttatcaacggtttgtccatgggagttctcctgctgctgcgtgtggaccccaatgcaaagaatgatatcatgacagagacagagcttcgcacgatcgtcgatgtgagccatgaagacggcgtcattgaatccgacgagcgtgaaatgatatacaatgtgttcgacctgggagatgccaaggccaaggatgtcatggtaccgcgtgtccatgtgacatttgcagatgtggagagcacctacgaagaactgctggagatattccgggaggataaattcacaaggctgccggtctttgaggagacaacggataacgttatcggaaccatcaatatgaaagaccttcttctctacgacaatacgaaggaattccatatacgcgacatactgcgcgaagcatattttacctatgaatataaaaacatttccgagctgctcgtagagatgcggcaggcctcttttaacattgctatcgtattagatgaatatggcgaaacagccggacttattacattagaagatatattagaggaaatcgtcggtgagatccatgacgaatacgacgaaaatgaggaagattttattcaggagatcggggagcgtgaatttatcgtcgagggttccacgaacctggacgacttaaatgaccggctgaacctgaacctggaatctgaagattatgactcggtcggcggctttatcatcgagcggctggaccggctgcctgaggccggtgacacgatcaccacggaggacggcatacgtatggtagtcgagactctggataaaaacaggatcgagactgtgcatatgtatctgccggaacgtgaggcagatgaagatacggatgattaaaaggatatcacgataataacagacgctggaatctgcattccagcgtctgttttatgtctcttcctgttcttcttccacgtcttctcctgccagtttcagaagcgcctcgacctgctctgtctccatgctaagctgctgcgccacctcatccacagatactttcctgcccatatcttcactcatatggcgaatcgtctcatcgagctccgccacctggctcaccatctttttatcctgacgtctcgtctctgtctgagactctataaatgcctgcagtccggcgcgcacttcttccatgatctcctgctcactgtccgccgccccttcaaaacgcctgagcgctgccatgagacttaagttgccctcctgtatcatgtcgccgatgaaaagctctttgcggtgcatctgaagcgccgcgtccgcaacgagaggcagatagtaggccatgcgggcttcttccacacttcctcccctcatgttctctatttcctgtatatattccgtaaaatactcctgctcttcactgcttagatctgcggactcttcgcctgactcgatgatctttcccggctgctttttataccctgcaacagtgaccttctgagcaagcagatagtcgcagacgagttccgtctgttcctgagaaaggccgtcctcctcaaaaaacttttctatttcctccacagtaaggcggttcccctgtcccgcggcggtctcctggatgctgcccagtttgcttctgaattccaatctgtctgccatgatctatatcctcccaagttccggccgtatccgtccatgctgtacagcggccctgccggtttacaaaatatattagcatactctatctgaaaatgccattgtaaatcaaacgcgaaagtgatacgattacgtttgcataacgaatatatacggctgccgccggcgaaaaggagcatatgatcatgtcaataacaaaaggtattcttaaaatagacggggccaggccggaaggggcaaatccgcttccgctgttcagagaccgtcagaaaaacaaacaccctaaaagcaacggtacgatgcgtccggaggaactggattattttgggtatgaatcagctttccgcgtgcttccctataaaatgcaggaccgctatacgagaaccaaaacgagacttacgcttacatctgtagtgctggaaaatgaacatctgagagctgagtttctcccggaattcggaggccgtctctattcgctgagagaaaaagagacggaccgtgagctgctctactgcaatcctgtcatgcagcccgccaacctggctatccgcaacgcctggttttccggcgggatcgaatggaatatcgcccagctcggacatacgttttccacatgtgacgacgtgtttttcgctgccgtcaaagcaggcggcgcatccggcggcaaagaggaagaatttctgcgcatgtacgactatgaacggacgagaggactcgtatggcagatagatttccacctgccagagggcgcacggagcctcactgcccacgtcaggatcgtaaatgaccagcctcacagtgttcctatgtactggtggaccaacattgccgtaaaggaggaggagggaagccgggtcttctcctgcacagatgaggttctctatatcgagccgcagtcgcaggccgaaggctgcgaacactgcttcggccgcggtcagcttcctgatcttcccgtactgcccggaaaagatgcctcctactctctcaactttgacttttccagcgaatacttcttccagaatccggtgtcggatgccgccccgtgggaggcagtctcctacaaggacggcaccgtattctgtgagcgctccacacagccgctccgtatccgcaagatgttctgctggggcagtcacagcggggggcgcagctggtgcgattatctgtctctgccgggccagggcgattacatcgagattcaggccggacttgcgccgacgcagctgcacggaatggagatggacgctcagagcagtattgaatttacccagatattcggcactgcagccgtacagcccggagaaggcaatctggactcttacggacaggcacaggcacttatccggcaggcggtggaacagtcgcttccggcggaggaagtcgcgcgggcagacatgcactgccggacactcgcttccctcccatgcgaaacgatactgcaccgcggccacggatggggcacgctcgagaatatgcgccggcgggcggaaaataagccgcttcttcccgcctccttcacatttccacaagatacgctcggcaaagagcaggaaccgtggatctgcctcctggaaggccgcgcgctgccggaactaaatgatacgcactttcccgcttcatggatgacagatgccaattatatcccatacctggagcgctgtatcaaaagcgatccacacaataccgccgcacagcttcatctcggcgtaaacctgtacgaaaacggcagatacgatgaagccgccgccttgtgggaaaaagccctgctggcaaaacctctgccgatcctgcaccgcaatcttgcctgcgcggcacatcaggaaggagacctgaaaaaagccatccggcagatggaacagatcacccttgatacttacatagcggcagacgccgccttcctccaggaatacttgcgcctcctggccgaagacggacagtggcagaaactgaacgacatatatcaaaaactgcccgcgcgcctgaaagaagaagaacggatataccttctcgaatgcgaagccgcacttcatctggaaaactggagctttctggaagaagcattccagaaagaatatgcatccatccgggaaggagagacaaagataaccgacatctggtttgcatacgcggcggcaaatcagatcgatccaaaacaactgcccaaaaatctcgatcttcggatgttctgatcgatggggacagggcaaaatgagttggggacggggtttttctagaaaaaccccgtccccaattcattttgccctgtcccttttatactcggttcctcatcaggaagatgatccctccgaacagtccgaagatgatccccacgtatattgccgcgcacatgatgcctgtggcatatgccagaaccgatacgcctgatataacgcagaaaagtattcctgcgatgagggccgcagcggtccagcatataatatttgccgcaagaaatacaccggtcgccgagtcattttgaaatgttttatttgtaagttcccatagtcgtttcatcgcaatacctccttgccaaactcctgctcatctctttgttgtctacattatagccaggtattgttaagggaacctgcagaccggtgataaatctgcgttaaatcttttcagcttatgatcaatgtatcatagccgtccatcttaagtcttcgttccatcgccaccgcatcgctcagattatcatatcctcctacctgaacacttataaacggtccggaatcgtcgataaacgcgggataatcctgctccagaagttcattgcgcagccgttctgcatatctccagtttctgaacagtccaacctgtactctgtaataattctcctgaatgactccttctgcgttcagcgcatcgagcagacctgtggcgatcgcctccgcgatggcgtcaaagttgttgtcaaaaagcatattgtccgtatcggaattgataaacccggcctctacaagtaccgccggcatgtttgttcttttcagcacgacgagattgggtcttgccttcactcccaggtttacaaaccccacagcctcgagctgggcgttaatgtcctgggccacctggtatttgagccctgacaggtcatatacaaggctctccacccccgagacttcgttatccgtcgggaaggaattcctgtgtatggacagaaaaaaatccacccccgcattgtttgctttcatcgctttctcatatggtgtctcgtatacatccgttgtcctcgtgtaggacacatctattccattgtcctgcaatatctcgcccactgccagagcaagacgcaacgtatcatctttctcctgtctgccgttaaagacagcgcctggatcccggccgccgtggccggcatccaccatgactgaatatggcataaaaaatcccctttcgcaacattctataatagaatatgcagtgaaagggaatttgggaaccgcgatatatccgccaataaataaaaacgtattacattctgatcttttctatcttaaccttaccgtatatcttctccatgtcatccggatcaaagatacccgtctcctcctggagcgccgcggccgccgagaccgcgctggcccttcgcagcgtctcttccatggaatctcctcgttccagccccatggcaaaccccgcgatcatagagtcaccgcagccaactgaattcaccgtgtcaagccgcggcaccgtcgcccggtagacaccgctgccgcacacgacgagagaaccgtcggcgccgagcgacaccgccacgttctccactcctctttcacggatcttaagcgccgcctctatgatgtcctccattttgccgcagtccttccctgtgagcatgcgtatctcatcgatatttggtttgatgagtgaaggtttcgcttcgatcccgagctccagaagcgcgccgctcgtgtccaggatgaccttgctgccggcttcctttgcgatggcggtcagcctctgatacgcagtgccgtcaagccctcttgggacacttcccgagacagccaccacatccgcgcgcgctgcaagatgccggtattgttccataaaccggtcaaattcctccgccgtcaccgtcactcccggttccagcagttccgtctggatcccgttcttttcatcccagatattcacacaggaccggctctcctcgctgacacagcagaacgcgcaggaaacaccaaagttctcaagcgcttcctcaatataccgccccgcatggccgcccacaaatcccgtcgcggtagtctcccctcccgcgatccgcacgactctggatacattcagcccttttcctcccggcgtatactggcactccttcaggcggttgacctcacctactttaaattcctccagcacatacctcttgtctatagacgcattcaatgtaactgtcagtatcatggcaacctcctaatcttcattgacaagcagcacttttcccttgacaagtcccggcgtcttaaacatttgaaacgccttctgagcctgttccataggcatcttcttatagataaagcccgggtcaaacttaagctgtcctgttgcgaaataatgcgccgtcaattcccattccttccccgggaaaggcgcgctgtacgacatccaggaaccggtcagcctgaattctttccggttcatgttctcccacatggaaggggtaaacgaaagctccgcgtgaggcgttccgataaagcagacgtccgccttgttggccgccagttcaaacgccatctgcatcgtcggcacctgtcccgccgtctcgaatacgtaatcataccctctctggcccgtgatctccattgccttttccataaaattctcttccgagctgttcacaacctcgtcggcgccaagcttttcggccagcttcaggcgctccttgcttatgtcgaacacaacgacttttctggcgccgaatattttcgcccactgcatcgtaaacataccgatcgtgccgccgccgagcacagccacatatccgccgcccttatagtcattctgtaatacaccgtgaagcgcaacggtagaaggttcaaacatggccccctgctcataagaaacagatttatcgaacacgaccgcgttctgctcggggatcacaacatagtccgcattgctcccctgctgcctggagccgataaaactgtatttcttacagagcgaaaagttgccgttctggcagtcgtcacacttcatacacggcagaagaggcgcccctgacaccctgtctccgacttttaccctggtgactccctctccggtctccactacgtcaccggaaaactcatgcccgagaacgatcgggtaaaaatgcactccgttgtggagcactctcggaatatcagagccgcatatgccggaggccttcacctttaccttcaccattcccggtcctgcgttcggctcctcgtgatccagataccgcacatcctcatttgcacatacaaccgctgctttcatcgttacatatctcctttcattactgctttcagattctcatacagcttccggtacaccttgtaattccttgtatacacttcctgtgtatcaggatccggctcgtggtaccgtttctctgccaccgtctttttgacagcctcatcaaagcttttgtacatgccgacaccgacacctgccagaataacagcgccaagcgttgttgccgtatcggaagacggcacgacaatgcgcttgcccgtcacgtcggccttgatctgcgtccacaacagggaattggcagaacctcccatggagcgcagctcactcacagacgcccccgcctgctctgccacatcgagattgtgccgcagtgagagggccacgccttccatcgccgctctgataaaatgtccttttgtcttgctgaagtcaagtccgtaatacaccccctttgcgtccgggtcccatataggagaacgctcccctgacatataaggaaggaacacgacgccgtcgctccccgcggagacttcgccggccagttcattaaaaagctccagcgagctttttcccgtttccttgcccttcatgcgctcgtaatcgccaaattcatgctccagccaccgcataacaccgccgccgccgacggttcctccctggagtatccactgccccggaaccgcatgaaagctcaggataagccgctcgtccgccttgtatgtatccatgcagatgctcatgccgcctgcctggcctccctgctcctgcgtctcacccggatgtacggcgcccgcgccgagcgttccgcacgcggcatccagcgctcccgccacaacgggaatcccctccatcagaccgcattcttttgccgccttcgccgtcaccgtgccgatgacatcatggctggcacagatggcgggcagcatgtcaggatccatgccgaggtcacggcacatctccatatcccacgtcccctgacgcatgcagaagcagtgatggccgtacccctgcgtcagctcctgcgtcacctcaccggtcagtttaaaagcaatataactgttggactgcagaattttgtccgtcttcctgtacacgtccggcatctgctctttataccagagtaccttaggcgtagagtaagaaggcttaaacggattgccgcacacgtcaaatatccgtttctcaccgacacgggctcccgtttcctcacagatgccggcagccctcgtatccatccagataggcgtattggccagaaccttcccttccgcgtcgatcggtatggcagaccagctctgcccgtcgataccgataccggcaacagacccgggccgtatgccgctcttttccatagcggccttcactgcagaacataccgcctgccaccattcctccggattctgttccgcccagccgggatgcggataatatacgttgtaggcgccgctggcgcccgcctttacctgaccgttctcatcaaatacggcgaccttacatgcacttgttccaatatcgattcccaataaatactgctccatagcaccactcattctttccgcctctattttgccctgccgtcacatccgcatactttcatacggcctttgacgagttccttcacagcttccataccgacagtccctaacttcttcgggtcaaatgtctccggcttctccccgagaagtttcttgcaggcgtccgtgtaggcaacgcgcagctctgtggcaaagttcactttgcacatccctctttttacacattccctcacatcctcgtcacttagtcccgacgcgccgtgaagcaccaacggcaccggcacggcctctttgatctggctcacccgctccttatccagcaccggcgtgcccgcatagaagccgtgagctgtgccgatggcgatcgccagagaagacactcccgtacgttctacaaacaccttcgcctccgccgggttggtattcgtgtcggcctcagcctcaaggtcgtcctcttttcctcccaccttgccaagctcagcctcaaccggaatgccgcaggctgccgccacatcggccactctcttcgtgagcgcgatattattttccagatcttcgtgtgaaccgtcgatcatgacagaggtatatcctgctttcattgcctgcacggcaagctcaaaactgctgccgtgatccagatgaaggcataccggcacagacgccttttttgcctcagctgaaacgatgccgaaataagtctccagacttccgtacttcacagtcgacggcgtcgtctgcagcatgaccggagcgttcagctcctccgccgcctggatgacagcctttaccatctccatattttccacattgaatgccccgacggcatatccgcccttctgggcatcgagcagcatttgttctgatgtaactaatggcatgattatctctccttttcctttgcttctttttcttttcccggataaatacattcgatcctgttcttttcaaattcctgaagccattgtcctcccggcttcctgtccgtcacgatcttcgtaagttcggtccactccgccacttttgtaaacgcgatctctccgaacttggagctgtccgctacaaggatcctctcctttgcggaaccaagcatcatcctcttgctgtttgcgtcctgttcatcggaatccgtgatccctgcttccaggctcaggcctttgcacgagatgaccgctttgtccacgtgataggactggatcatgcggtccgtgtgcggaccgacgagggcaaatgacttctctctggacacgccgcctgtagagatcacattccactccggcatgtcaaacagttccacaatgatctcgaccgagttcgttatgaccgtaagctttttcttttctttcagcgctctggctatgtaaacgtccgtagaactggcgtccagcatgaccgcttcgccgtcccggaccatcccgactatgagctccgccatcttctgcttttccacgatcttctgattctttcttatgttaaacggcaggtcgaagatgctgtgctcattcagcaccgcgcctccgtagctctttatgacaagtccgtcgttctcaagcttctctaaatcccttcttatcgtctcctcagacacctgatatgactgactaagttcactgacaacgactcttttctccttctgaagacgttccaatatatcattgcgtctctctattgctagcattttaacacctccgaattctgtgtgcgactgtctcttaccgctccatgtcagccggatgcctgccggtcagaccgtattgttttctcatgctgtagagcctctttacctgttcttcagggagaacctgcggtccgccgatctgcattgcctgatacagaagccgcgcgtagaattccagagattccatcttgtggtaagcgccgagcagagagtccccatatgtgagagctccatggttctcaagcagtaccgcgtcataatatggaagatactctgatactgcatcgggtatctcttccgtggacggcgtcccgtatttcgcaagcggcactgtgccgagtgatataacagcctccggcatgataggcgccgtaagctccatacccgataccgcaaatgtggtggcatacataggatgagcatgtaccactgatctgacatcctccctctccttgtacacgcgcatgtgcatcttgatctcagaagacggcttaaagccttcattcgcctcgatcacatttccttcagcgtcgaccttacatatgtactccggcgtcatgaaccctttgcttactcctgtgggcgtacataaaaactcattgtcatttaatttcacagaaaagttcccatcgttggccgcaaccatacccctgttatacaccctcttacctatctcacacatctcatttttgatatcaagttcgctctgcatgcgcatgtcctccttattctgatccggccggatcacctttgcttttcgttgtttctaagttgatactaccatataattcaatgcaattcaactaaaatatgtgtggttttatgttgtttttgaatttcatacgataaaaggcaaatccaattggggacggggtatttttaaaaataccccgtccccaattgattttaaaaaaagcagaaggctcatccctgttatcgggaaagcagcctcctgcctttacactgcgtgctacagtgcctttgtcagttctttcatatcttctttcaaatgacggtagatatttttgtacagtctgaaatattcattatattttttgtggttttcttcatttggcatgatctttttatcgagtacctgccatttctttacttcttcatatgtaaggattcccgttccgatgcccgcaagcatgacatcacccatgtttgcctccacgtcatagatagggcatacgaccggatagcctgtcacgtctgcaaatatctgacgccatacctttgactttgtcacgccgcctgctatgagaatgtattctcccagatcttctcccgtcgcttccatggcatcccgcagacagtaggcgaccgcctccagaaacgcccggtaaatatgtccctttgtgtgtgtaagagacaggccgacgatcgtaccttttgcgtcagaatcccacaccgggcttctctctcccataaagtacggaagtacgacaaggccttcactccctgcgggaatctcttccgcctgctcattcagcacgtcatatacgctcggaccgccgttcttctgattctctacttcccactggcagagcgtattgcggaaccattttatgatggcccctgccgtgttgcccccggcaaagtagtaagaaaggttcttggcgtcataaaggtacggccaaatgataagcccctttccctttaccggcctgtcagagatgagagccgcgcacatagaagttccgatggccgcagcgtacacgcccgcctcaaacacgccgagtccgatattggcggctccgcagtcgatccctccggcgatcacaggaagtccctcccacagcccgagctcttctgccatgtcctttttaagtccgccgataatatccgtggattccacgatcttctgaggcatcatggaaagcgggatatccatggcgtccagcagttcctcggaccatacgcggtcattcatgtcaaagataccgccgatatttccggcggaggaatagtcgatcgcgacctctccggtcagcttgtatatcacataatcgttcggcggaaggaacagttttgttcttgcccagttgtcaggctcattatgtttcatccacaggatcttcgtatatccataataaggatccgccccattgtgcgtgatctcaagcagcttctcctcaccgatatgttcaagcgcccactctgtttccttctgcgcgcgtctgtccatccagatcatacatggtctcaccggcttcatctcttcatccagcggtattccggaaccgccgtaaagcccgctgatcgcgatccccttgatctcctctttcttcacgccgcactctgccaccgctttctccaccgtcctgcggatagactcttttgaagcctcataccagacatccggccactgctccgcccagagcggctttggcgtaagtacgtcgtattcctccagcgcctgggatatgagtctgcctttcgtatccatcagaatcgttttcgtgccggacgttccgatatctgttcccaataaatattccatcgcatttcctcctaaatataacatgttatcatgttacgcttctgtcgttttgcagttgttccgttcgtcttctccgtcccagatgtctctccagctttcggcctcttcccagagaaatactttacctttgataaggcgggcatttctgtccgcccttttcagagtgtccatctcttcttccgtcagaaaatcctctgttgtacaccgcaggttctccacatactctttctcgtacacagaaaaaggaatggggacatgccccctctgcactgcccattttacacacaccgacgcagggtggcagccgtgtgtctccgcgatttccttaagctccggcatctcaaaagtaacgacatccccttcttccgtgtcccgctctggacggcacggcgaacccatcgggctgtaagcgacaggaagtataccgtgggacatacaatagtcaaacagcaccggctgctgaaacgtcggatttatctccacttccaggacaaccggcctgatcctgcacagagggagcacctgctcaagctttgtgaccgtcatgttagacataccaaggcttctgacgagtcccatatcgaccagacgctccatctgcctccacaccgacatatactcctccacagaaaatgggaccgcatccggattcctgcccgtcagcacagcgccaggcgcatgatagttcgggaagggccagtgcaccatatacacatccacataatccagctttaagtcccgaaggctctctgcacaggcgacgagcacatcgccttttccgtgcatatcgttccagagcttcgtcataacagtcagttcctgtctctgtacaacaccttccgcaaatacacgggccagcacctgtccgatgtcccgctcatttccgtaagctgccgcacagtccagaagccggtatcctgcctttatagctccgtataccgcgtcagctacctcccgcggcgcataccggtcattgccgaatgtccccataccgatacccgggatgatcatcccattgctcagttttctctggggaacagccgccggatccacattctccataagcatcctcctcatccactgccggacagacggatacgcgggtgatccaccctcgtatccgccccggaattttcaatcgacattatgtaaaatcattttataaaacttatttatattttaaaccactgacaaacttctgtcaatcccaatcacttctaaatttacttccactccagcatatatctctggaactccagcgcacggcgcgcgtcatcgtcaagctgtgcctcgtctgctccacggcttatgtctctccacaccttgatatcagcgccgacctgtcctcccatgcgaacgaacggctccattacagcagttccgtcatatccgatatcacggagagcatcccctatctcacgccatggaatacgtcccttcccgggcaccatgcggttgcattctccggtgtggaaatgcccgagcagttttcctgcccggcggatcgcgccgccgatgctttgctcttctatattcatatggaatgtatccagcatgacctttacgttgtccatgccgacttcctctacaaacttcacaccttcctcggctgtattcaggatatggctctcaaaccggttcagaacttccatgcccaggttgatgtcatatttggccgcggccggcgccagcctctgcatgccctctacactccacttccagtcttccgttttatcggcgtttgcaaaatcgacaggccagtaagaatagagcgcccctccgatcaggtggatatcaagctctgccagcacttcaaataacctcttataccattccagcgcctcttcccttaccccggcgtctgaagaaccgatattgtggttgaacgtcggaccgtatccggccgtcagcgtgatcccattgtcctgcgcacatttctttaactcctttacctcctgctccgagtaatccggcagcggcccggcgccgatctccagaatgtcaaacccaagctttgccaccttttcaacatagcgcttgtagtcggccgcccattcttgttcccagtatgcataatagataccatgtttcatttttctttcctccttcagagtttttttattaccagacctgccagatctactgtgcaggtcagtgatacacttttatatcaaaggatctgtggatcattcctcttgcctcttccttgccggcaaattcaccgcggcagatcatctgcgccgcaatatttccgatggcggtcccctccgtcggaccgacgtgcacctctttgccggtcgccctggccgtcagttcgttcagatagtccgcattgcccccgcctccgacgatatgtatcctgctgtacgttcttccggtggacgcttcgatccctttgatcgtccggtcataacactccgcaaggcttgcgtacacacaggcagctgtctctccaagcgtctcgggcacctgctggcctgttctgcggcagtagtcctttatctcttctgtcatattgtccggcgccataaagcagttgtccgtcacgtctactctggacgggaaatccgccgcctcagccgcctggctgcatatctcggcgaagctgtacttatcatccagatcatgccttacagactggatcatccagagtcccatgatgttgcgcagataacagatttttgaatcatatccgccttcattcgtgaaatcattgacccggctcgtctccgaacagtccggcatatcccgctcaatgccgagcagagaccaggtgccggaactgatgaaagcatagtcgtcatccgtggccggaacggccagaatggcagagcctgtatcgtggctgcacggaaggacaacatccatatcaaacccgaattcttccacaagcgcgggccggagcgtcccaagcttctcccccggcatagccatgcgctggaacataccgctgttaaatccgagcttttcgatcagttcatagtcccagtctctcttctgcgcattgacaagctgggatgtagtggcttccgtatactcatttaccttctctccggtcagcagaaaatggaagaaatcaggcacaaacaacagcgcttttgcctgctccatatattccgggctgaatttcttctcagccatcagctggaagatcgtgttgaacatcatcttttcaattccggttctttcgtacagctccctctccggaataattttatacacctctttgtccataccgtcggtgcgtttgtctctgtagcctgtcatgttgccaagtacccggtcatgctcatcgagaaggacatagtccactccccatgtatcgatacccatgctgaccggtatcttcccgatctccccgcattttttgatcccatttttaatatgttcaaacagcttctcatgatcccagcagagatgcccatctttttttatcataccattttcaaaacggtatacctcttccagcacgatctttccgttctccacgctaccaaggatgtggcgtccgctggacgcgccgatgtccactgccaaataatataacggcataattgttcctcctgacttattttgtactttgttttccaaaacctgtttccagctcatagtatgaccgaaggcagttatagccttcctcgaacagcgctttctgcctcgcatagacgtctctgttatttctgtccgggtaaaaggaacgctccggcttcacaaactggtgtatgacggaaaagtcttcaaacacacccacgccgacgccggcgatgactgccgctgccaccgatgtggccgtctcaacgtaatcaagccggcgcagcgcaacgcccagaacgtccgacaggatctgggcgaggacatcacctttcgccccgccgcccgtcagcacaagctcctccacatgcgtatactctctgtgcgccttcaggatcagatccagattcatggcgaccccttccagcaccgcccggatgtagtcgcacttctcatgttccattttgataccgagaaagcttcccgacgtatccggattccatctcggactccgttccccgagcatataaggcagaaagacgagccctctggcgccggccggcgaatctgtgacgagccggttcaatatatcatataccggtattccttcatcctgcgcccgcctttcctcttccctgcagagcgttttccgtatgtaggagtaggaactccccgccgcctgcatcgtcccgcacggcatatattttccgggtatgacgtgtccaaaacagatcagtgtcttctccttatccagaaatacttcttcagaagttcccgcgatccacgcggacgtgccaaaggagagaaacatctgtcccttttcgatactgccggcgccaagcgccgaacacgggccgtccccgcctccgcacacgaccctggtctccttcttaagtccgagcgcctgcgctgcctccggcagcagttgtccgactacgtctgtggacgcgttaagttccggcatcttttccatctcgatctctgccgcgcccaatatctcctccgaccacctgcggtttctcaggtcaaaggcatctgtgcccgacgcctcggagtgatcggtcacaaagtttcctgtcagtctgcagatgatgtaatcctttgccagcagcatcttgtaagtccggccgtacaactctggctcattgtcgcggatccacatgagcttctcaatgctgtaacttgcgctcgcccggtgtccgttcagctcatacatccgttcggctccgacccgttctataagctgacgcgcctgctcctctgcccttaagtccgcccatatcatggcaggtctgagcgcgttgccctgccggtccacgaccacacatgcctgcatctgcgaggagaacgaaaggccaagcacgtcctctggacagatgccgtccacgatcttcctcgtcgccgtgcagactgcgttccaccagtcaagaggattctgctccgcacagttcttctggaaaaaccggacatcgtaaggtaccgtgtaactctttatgagcctgccctctgtggagaacagtgaagctttgttgcttgacgtccccagatcatgggcgatcaggtatttatccacaattttcctccttgttccgtccggacagatgatacgtccggctcattgcgcttattataccatacgatataggaaaagtaaacttaagaaattaatttactttcgtacgaaaccattcaacttgacataacctgttttatatgctagtatactaatgattcaaagaagagtgatcaccggtcaggagggatatctatgagggagcggcacactgcgcttctggagtacatcacagagcacggaaaaacagaagtaaatatacttgccgagcatcttaacacatcaaaggtcacagtacgaaaggacttagattacctggctgaacgcggtatgctgaaacgggaacgcggatacgctgtcccgaacgacccgggagatatcaattaccggatggcgctccattataataacaagcagaagatcgcgcgccgggccgcctcttccgtccaggacggggagacactgatcattgaatccggctccacctgcgcgctttttgccgatgaactggcaaaatccaaaaagaatgtcacgatcatcaccaattccttttacctggcgaattacctgaaagggtacacgaatatacagcttatcgtacttggcggcacgctccagcctcatggccagtcactggtagggccgcttaccaaaagcgcggccggcaattttcacgtagacaaaatatttgtcgggacagacggatattcccgcacttcgggatttacgggggacgatctgatacgttccgataccttaagctccatgaccggttccgcagagcatacttatgtgctggccggctccgaaaagttcagccagcccggttccgtcgctttccttgacttaaaagatgtatatgaggtgatcaccgacggagacattccgccggaagagaaatcctatctcgagggacaggggatcatcgtgacaatagcatgacaagccgcgcccggcatgcgggcgcatatatgataatataagaggaggcttttatgaaatatctgttagacaccgcaaatcttaaggatatcgcacactactgcgatatctttccgatcgcaggcgtaacatccaacccatctatcgtaaaaaaagaaggcagcattgatttcttccgccacatgagagagatccgttctgtgatcggaccggaaagcccgttccacatccaggtgacggctctcgataccgacggaatgctcagagacgccgacgccattctggagcatgtagatcctaacgtgtacgtcaaggttcccgttactctggaaggcatccgcgccatcaagcggatgaaggcgctcaagatccgcaccaccgccaccgcggtctacagcagacagcagggatttcttgcaatggaggcaggcgcagactgcatcgccccctactacaaccgtatggaaaatatgggcatagacgcggaagatgtcattgcctctctggcggaaatgatcgaacgttacggctacccgactcaaatactggccgcaagctttaaaaacgccggacaggtagaccgtgcttttctggcaggcgcccagacggcaacgatggatccgtccatactggaggggatactcacccagccgcacatcctgagcgcagtggatgcctttgatgccgactggaaatctgtgttcggcggtaagacgatcgccatgctttaaggtaagacagaagggccctgctccagtatccctctgatgagataaagctttgccgtccatctgccctccatagtgcattgatcctgaagacaggtaaatatgcgctctaccgctgcatacaggtcctgtctgtacataatgacctctgccctgtcgcttttggccagctcatctactgccgcgatcttgacagccgcatgggatttccgaaaggtctccactgtcagctctccgctctctctgtcactgcatataacggcatcgggctgcgcgtctgccggtgtcatcagccggcccagcatggcttcacttttctctgcatccttccacggcaggcacagaagccgggccgccggcccggccgcctctctgtacgcctgccggcgcgtacgtatgctgtacgcctcctgcagatcccaacctatatacgcgatgtctttatatccctgtctcacgagttcttcatacaatgtctgtactgccagtctgttgtccagcgccacgcagtccgcatacggaagtcctttgtcggaatcaaagaacacgagattcattccaagcgagcgcagcctcctaagcttatccgggtcggccgtcatatcttccagccagacgaccacattgcgcagtccccttttatagagtctgtacagacagcgctccagctcctctgtgcgcggcttttccacgtaaagcaggagcgctccctttgtctcggcatagttctggaaccgggcgataaattctgaaaagaacggattctgggccggggcgatgagaaccaccatatccagctcgcttctgttccctgcattgcgcagcgtaactgtcgtgcctctccctacttcccgtacaacaagaccttcttcctccagaagctccagcgactttctcaccgtgacacggcttacgccaagcagctcttccagctcccgctcaggcggtatccggtcgccatcctcataatgcccttcaaatatttcattacagattctgttctttactgtctcatataaattctcatttcccataatatctctatcctacatgcttgtggattccatgtccagacgtttgatgatatcttcctgaatatccggcgacagatccaggaaattgacaaacgtaccgtgtattctcatgatatacaccccgcccggcgcatatttcttcgggttgtcaagcaccttcctgagcatttccggcgttgtcacatttacatacagatagaacggtgcgatgccttccttctttggattataaaaaagcggcgctattatcttatctttgaactcgagcccttttccttcaaaggtctccgccttaaaataattcggattgacgccgagatgagaggcgcagcctccgttcatcttgccgaatggaagtttcatattggacagcatccggaagccgagcccggaatgtgcctcaccgtacagcggatcgatgccgtagccgagctgttctcttgctttccttccgtccggtgtcgccccgacccagtatccgtacagaaggtgtgtggacggtgacgcccagtcggcccggaacggattgccgagataattctttctggacgccacaaggtcgctcactctccctgctatttccgccgcctcatcatccacttttgcaatgttgtttccgtacttttctgccttcataagatactgccgcatctccgggtcgtgctcaaaattatcccgcagcgcttccagcatcctgcttgcatcctccggccgttctgcaagcagtgtgtcgatggccgcaaaagagtctgccacaacggaaagaccatggatgagacagccgctgccgttatactttgtcccctgcgccttcgtatccctcacgtcgagcccgctttcaattccgcccatcagcgtggacaaaaacggcacctggagcagagagacagcctccgaggccgcgttcgcacacgcagtcatcctatccacatacagttccagattttcataaaagaccgtacgtatattctggagcagttcaaggtctgtatgatatccggattcttcactgcttctgccgaatttctttccggatatcgttgagacgccgccgttcagagacaattccagcacctttgccatgttcagccagctgttcgtcgtattgccgttgtctttccccatgatcagaggttcctggcatcccgccacagaatagtcttccagatcctccggatctaccttgtttttctctcttaatatttcaaatacagaatcatcattaaagaaagacggtgtcaggcatccgggcgtaaacaggaatctgccgagactctcatacagctcattcggagtgttcttatgcagtttcacagacagaatgggctggggcaggttcatgtcgtaatatgcgtcaagaagcgcgtaggacgtaacgtttgtcatatcctcccctgtgttcgacttgccgccgatgatcaggttctgggagatggcccagctcctgtccgccacgttgtaaaatacaaggagatgcttcagaagcgctgccgccatctcccggtctgtgttctccgccagccggtacggttcaaaaatacggtccgcgttccccactgaaaatgcatacggattcggcgtctgttccagacacatcacctgccacatgagaagaaaggactgtatcgcttcatagaggttgcaggcgccatgcaaaggtacattcttaagtgtttccgccattaagagaaatcgttcccggtcctttcctgctgccgccgctgccttttcctccgccagagcggcatatctttcagcgatcacgagcaccgcgccgagcgcagtgtccatcgcctcataataggccagcttctgaacatcggtttccttcccacgctgctcatcaatgcgccttttcagcccttccactccgatcctgagcaccgggcgcatgtccggtatgagatgacctgtcacctgttcaataaagtagatcgcttcacttgtatcgtctcccgccttgtcatatgcactgcaaagcgccctggagaacgctgtctttgtattatattccttcagctcctctatgcgctcccgggtaatgtcaccggcagggtcgatatctccgaacacagccacagggtcgcagtatccggtgaaagagtccacagaaaacgcggggttaataagcgcataggatctggcaaacgcatcgtcctgcgttcccgcgaacacctggtgatcactgagccacagaggaagcttttctgcaaccgcagcgagtgtctttgcagtccgtatacagtccggctcctccttatattctctgtcacactcccgcatgatttcttttgccagaaaccatccctccagatggtctactccccgctcttcctgaaatcttttcttcgccagctcggtaagctctccggcgtctaatatcttttcaattctcataactgttattctccttttaatgaatcacacgttatttataagttcttggccggctctgctacgtctttttataacggcatcccgactctgcgaccgctttccggaatcctttgagcacctcatccttcacaaacgcattccgtgtcatttcgtatttccaaccgcacgcttcccatttctttctgccgaactcgtgatatgccagcacctcgaacgtcacattctctcctctgatcccgctgaagaattccagaaatgcttcgaggtcgtcctccccgtcgtttacccctccgatcagcggaacgcgcacgtggaccttcggatggcgggccgccgcttcccttatgttgtgcaggataccgccgcacggaatccccgtgtacgccgtatgctttgtatccgaacaatgcttgcagtctatgataagctcgtcgatatatggaaataatcccgccagcgcgggatgtgtcccatttgtttcgaccgccgtattgatgccgtactctttcagcagccgcagcgccttttccagttcatcgtactgcaaggtcgcttcccctccggtaaaagtcacacctccgccgtcataaaacatcagctcgcccgcgcaggcttcccggaacacctcctccggcgtctcctcctcataagaaaggtacatcccttttgtcttatgttctgtgacgcactccttcttttcgcacgtgcggcacacttctctgtccaccagcgtccccttaaccgccccgtgagggcagacagtctccagcagccactcactgtctgccatgatcacgccttccggtctcatcccctccgggttggcgcaccacggacatttcatattgcagccctgaagatgatagacgagccggttgccgcttccgtcctgggaatagttaaagcctttctgaaatatcttcatcacatgccctttccgtacgatcctttcatatgaaacaaatctttgttgtgtccatacagttctctgtacaccgcaaactgttcctcataatatttctggttctcgcggttcggtgtcacgaccgtatccttcatgcgtacaagccgggcgcacgcctcctcataatctgcgtattcaccgcacgcgacggccgccgttatggccgctccgatccctgcctgctcatttccgacgttagtatagatatcacagtcaaatatatccgcctgcatctccaggaacagctgtcctctggctccgcctccggatgcgatgatcttgctgtattcaataccgaggcccttgaatatctcaattgacgtgcgcaggccgaatacgatcccttccatcgtgctcctgatcatatgctccctgccgtgacggagcgtcatgccgaaatagatcccttttgcgtccgggtcattatatggcgtccgctcgccgctcagatatgggagaaataagagtccttcacttcctgccggcgccttagaggccagcgcggtcatctcgtcaaatgtatccatatgtaagatctgattcataagccacttcatggcaacaccgccgcttaagtgggctcccatcagcatccacagatctttcttcacatggcagaatgtgtttgtcctgtattcttcatcgtagagaggctcgttaaatccgccggatatctggcatgcagtgccaatgtttgccgacagcacgcctggactgataatgccgttgccgaccgcctgcatcagtgtatcgcccccgccgcaggctaccctgatcccgcactttaatcctgtcgcctcagcacacgcacggctcacagtacccacaacctcacacgactcatgacactttggaaagatctgtctgtcgatcccgaggctgtcgatcagttcccacgcccagcgccgccgcttcgtgtcaaaaatggcgccgcttgaagcatctgacatatctgtcccgtactccccgcacatccggaatcttatgtaatcctttggcaacatgatataccttatcttctcatagttttccggctcatgttctttcacccacataagtgaggcgatgagaaatccggtgctgagagagttcagcgccacgcttcggtacgcatcctctcctacaatatcatagatcttatggatctctgcctgtgaacgctggtccgcccatataatggcattgcgtatgagactgccgttctcatccgtcatgacgaggccgtgcatctgtcccgaatagctgattcccctgatctgcgccgcttcctccggatatcttctcaccacgtcggcgatcgtcttccttgcagcctcccacaattgctccatatcctgctccgcgtactccggtctgctttttataatgtcgtacccgacctgcgacgtcccggcaatatgcccttctgcatccatgagcagagacttcacgctggatgttccaatatctactcctaaataataattcatcaccgtacacctcctattattggtattgtataacaataccaatattgcgtcaatactttacacgcgatcctttctttttttataacggtatggtaaaataaccctccactataacaccagactttctgtctgtgataaaataaatcccggaaaggaggctgccgcccatgaacacatacagaacttctgaaattgccgcattgatcggcatacatccaaatacggtacggttatacgaacagtcgggccttattcccaggccagaacggcagtcaaacggttacaggatcttcacggatatccatgtagaacagtttaagcttgcccgcctggcatttcagatcgaagtgctgcagaatggtcttcggaaaaaaatcgttcagatggtgaaagtatccgctgcgggcgactatgacaccgcccttacgatcacacaagaatatcttgctcaggtacgcgcagaaacagccaacgcggaagaagcgatcgatatcgttaagaatatcctgaagggcacggccggacagtatacctgctctatgaaaaggaaggaagtctccgaatatctgaatatcaccatggatactctgcggaattgggagatgaacgggctgcttaccgtaaagcgcagacaaaacggataccgtgtatacacgggcggggatatcaggcggctgaagatcatccgctccctgcggtgcgcaaattattcgctggaatctattctgtccatgctcaatcagctgtcggaaaatccccggatagatattaaaaaagcgctcgacacgccgaaggagaacagcggcatcattgccgtgtgcgacaaactgatcacttcgctgacagccgcagaatgtaacgccttaaatatgatcgaaaaacttcaatatatgaaacatacattttcttaaccctccacttaaccaccactgtttatctgtgtggtattcttgcttttgaaaaagcaaggaggtaatactatgcaggaagtaataaaagtcacggaactcacaaaatcctacggcagcctgcccgccgtcagcagtctgagtctttcggtggcacgaggcacggtctttggtctcatcggccccaatggcgcagggaagtccacaacgatcgaatgtattcttggaacaaaaaaagccgacgccggaactgtccgtatcctgggggcagatcccagatcagaccggaaaaaactatttgagaagacaggagtgcagtttcaggatagcaattatcaggaacagatcaccgtatcagaactctgtgagctcacagcttctctttatgagaaaccggccgaccctttcggcctgctcgcaagatttggtatcgccgacaagaaaaagagccttgtcaaagacttatccggcggacagcggcagcgtctgtttattgtccttgccctcatccctgatccggacgtcgtctttctcgacgaactgacgaccggactggacgcaaaggcgcggcgggaagtgtggaacatactgtccggtctcaaaaaaagagggctcactatttttctcacctcacattttatggacgaggtggaagctctgtgcgaccgcatctgtattttaaaagagggaaaaagtgtattttacggcactgtttcggaggcggtagaaacgagcccctacggcaaatttgaggacgcttatctgtggtatacaaacgaggaggacatgtacaatgaaaacatttaaaaccatgctgaaaacagaactgaaattgtcactgcggggaatggatatgtttatattcgcgatctgcgttccccttgtcgtacttatcattctcggtattatttacggaagcagaccggcgtttccgggagcggaatacacctttctggaacagtcattcggcgcgctcactacgatatcagtctgcgccgggggagtcatgggactgccccttgtcatatcagactaccgcagcagaaatatattgaagcgttataaagtcaccccggtccgtccgtccatgctcctgttcgtccaggtggccgtctatacgctgtacgcgctgacatctcttttcactctgtatcttgcggcggtactgttcttcggatatgagttccggggatccgtcctgacttttgccggcggatatctactcgtactcgtgtccatgttcagcatcggcatgatggtgggcggcatcgcgcccaacactaaaacggccggtgtgatcgcaagcttattatattttcccatgctcatattttccggcgcgacacttccctacgaggtcatgccggatgcgctgcagaaagccgccaggctgctgccgctgacacaggggataaagctgctcaaagccgcttctttaggctctgacgccggaagcgccgcgatttccgttatcataatggctctgatcgccgtcctctgctctgcaatagcatttcgctgcttcaaatgggagtaagcccgacacaggccgcgctgacagtaaaacagccggaatcaggcactgccgcctgattccggctgttgatctgtccatgtccttccagactaagacacctggatcataaccttaccggtccttctgtattcaggtttggtaaatacgtccgcaatatcatccagcggaacgatatttgtgataagactctccagatcaatggccttggattccagaacctgaatggcccgttcaaatgtatatggattgataaaggaagaggtgatcttcaactctttcttaaacacatcgtccggtttcagcgggaagctttcgtccggcgctgccagtccgaaatacattaccgtcgcgcctttcccggcaaacttgaccgcgtcttcctgtgtatgtatattgccgacacattcgatcaccacatccacatttgcacagtagtctgccagaactgcctgcacatcctcactgatcggatcgatcgtcttcgtagcgccgagcttttctgcaagcttacgcttttcttccacaggctctgacatgattatcttggatgcccctgcgttcttcgccagctgcatcatgatcatgcctatcgggccgccgcccatcacgagcaccgtatcgccctgcttgatcccgcacaagtcgattccgtgcagacaacaggatatcggttccgccattgccgcctccacaaagctcagctcgtcggaaaacttatacacctgcttctcccggaggacgacatattctgcaaagccgccgtccactgtcgtgccgaggccgatattgttcgtgcagaagtgctgcatcgcattcttacagaaatagcattccccacacatgtcattcgggtcgccgctcacacggtctccgacttttacagccgtaacgccggcgccgacctttgccactgtacctgagaattcgtgtcccggtatcaacggaggggtgacttcaaaggaacctccgtcaccattgaagatgtggatgtccgtaccgcacactccacagtatttcacctttatcatgacttcattgtcttttaattctttctccggtacttcttccactctcaaatcctgtttcccataatataccgcagctttcatatttgaatacctccataattcgcagttaaatagtatcaaaaaactcatcgataaagcagatcgccgcgccggccgccgcagattccactttatatttacaagggaacaggaagtcttttgcacaatcactgaaggaagttctcttatctaccctccggcacagctcatccatgtatgactctatatacgctcctacatatcccccgagaatgatatctgagtcaaacagcatgcgtatattgtggatgccgagcgccaggtcgtccagatatttttcccagagtctttccgcctctctgtccttcgactgaagaagcgcaaaaaacagctccagattaccatccgtgtactggtccagattggtggagcggcacaccgtatcaaaacagccgtatctgccgcagtagcactgttctccgccttccggaacgaccgtcatatgtccgatctcaccacttttttgtgtatttccttcatatatattgttgtcgaccagaaccgcaccgcccacactgttgctcagactgatataaaatgcattgcatatctcatggtcgatccacacttcggcgtatcctgccgcgctcgaatcgtggaacagcctgcagttgtacgggatatatctggctatctcttcccttgtctttccggtaaagttaagagtaagaccgtatgtcacgacctcgccgtcctcagatacaaggccctgcaccgctattccgacgccgagcaggttctcatcgctgatttccgcatcatttttaatacgctctaccacttcacctattttttttaaataatcttcgtcctctaaattaaatttaatgcgctccttcgtcatgtcgatgacatcgcccgacagatctaccgccacgcagttaatatgatgcccggtaagatacacaccgatcgcagccctcgctcccttcacgtaggagtatgcagtggcattgcggcccccggtattctgtatctttttcgacgtatctatgagattcatctgctccagatattggagcttctgcgtgatcgtcggcagactgaatttcaggcccaaaacgatgtcctgcttggaaactgactggtgcgtccgtacataatgatatatctgttgactcttattcaatgttagctaccttcacttgtcttataattatatactcattattttacttacgattgcgccatatgtcaacaaacagtcccccaatcgcccgttttacgtgcatattctttaaaaccccggcaaatatatatttaccgggatttttaagcttaattattttgtatatatgtattgtattaattttgctgtctcttcttctgtatacagtcgaaaccaaccgcaagcgcaagtacgacacccatgacaacgtcctgaatataggaattgatgttcatcaataccataccgtttgtcagcgcaccgataatgaaagtacctgcgacaacaccggatatcttaccataaccaccggttacagacacgccgcccaatacaacacaagtgataaccttgaactcatatccaaggcctgcattcggcataccggaatttgtacgggacagcataacgatacctgcaagtcctgcaaagaatcccgagatagcaaatacaaggtatttgattcttcctacacggataccggacaaccttgccgcatccacattacctcctaccgcgtagaagtagcgtccgaaatacgttttattcaaaataaatgaacccaccgcaaagcagacgatcatgataattaccggaaccggaacaacgctgacatatccttgtccaatgatacggaaaccatctgtaaacccattgatcggaagcccgccgctcaagatatacgcgaatcccgcaaatgctgtctgcgttgcaaaggttgcgatcaatgccggaataccgatcgtggataccataaagccgttcagtacaccgatcagtgtagacactacaagtgtaacgagtatggcaagccacatatttactcccatattcaccatcaagtaagcgcagacaatattaacaaatgacataatagagcctgttgccaggtcaatatctccaagcaggatgacaaacgtcataccgatagaagcaatcccgtacatggatacctgacggagcagagaaaatatattgctcgggttaataaatctgggatttgcgatggtaaatgcgataacaagaactaaaaacacaacccaaatcgctttatcttttaactggtatactactttatctttcatacagtctgaccctccattcttgccgctgacgcatatgccatgatcctctcctgatcgaactcatctttttccagttcaccagtcatctctccttcagacagcactagaatcctgtctgacattcccatcagttcttccatctcagaagaaatcatcagaattgcctttccttctttttcaactaaatcattcatcagtttataaatctcatactttgcgccgacatcgataccccttgtcggttcatcaaagatgatcagctcagaatccgccgccagccatctcgccaaaataactttctgctgattaccaccacttaaattcttcacaagctggttcagcgtaggtgtcttaattgccatgctttcctcaaatttcttagccgtcttcagctccagtttggaattaatcacactaaaacgtgagttcttttcatatattggcatattgatattatttttaattgatatgccaagcattgctccgtggcgttttcgatcttcaggaactaacgcaattccaagatcgatggcttccctcgggctctttggattgatttcttttcctttgaaaaacatctgtccctttgtcttttgcgcggccccgaagatgacctctgcaagttctgtccgccctgcgccaaccagtccgccaagacctagtatctcacctttatgaaccttcaggtttatattgttatctccgttaccggtaatatccttaagttccagtaccacttcattcttatcaatacagtctttgcgcggcggataggtttctgtcagctcccgtcctaccatcagcttgatcagctcctgcacctcactgtcttttgtgatcagtgtctttacatattcaccgtcacgtaatacaagaattctatcagacagtcggtagatctcttccaatctatgagatatgtagacaatagaaataccttcttttctcagtctttctaccacctcgaacatactttcaacttccgcacttgttaacggtgcagaaggttcatccataatcaatatctttgcattctgctgaatcgctttggcgatctcaaccatctgctgataacctaccgtcagattcttcatcaaagctttgggatcaatcttgatatgtaactgctcaaatgctttggctgcctgtaattccatctccttcttatcaactacaattcctcttttgataggccgtcctaaaaacagattttccgccgccgacagttcttttacattattaaattcctgataaataattgcaattccattctccgatgcaagctgaggcgtcatgcttgtaaactctttgccattcacgacgatctttccggaggtagggataacagcccctgagcagcacttgatcagtgtagatttaccagctccgttttctccgatcagcgccaatatctcacctttttttagttccaacgtaacatctttcagtgctacaacacccgggtattcttttcttatatgctctaaccgcaatacatactcttcgttcatattattccccctgagtcaagcggatattatttagaggcgggtttaaccgcctctatctcatcgtctcgctatctttattatgatgttacattccttttatgatatcttcaacgctatccttgtctattgccttaacaggtcttacaacgttatgcttatcgcctgagaaatcttctccgctcaatattctctcatacatttccaagcaagcttttgctgtatctgtgcttgatccttcaaatccaacgattgctcttacagcctcatctcctgcctgaagagattctaactgctgcattgtaacgtctgttgtaataacgccaacattttctggaatcttgccggcgccgccgaatttctgaagtaatgcttcattagaaccgatcatagcgcctgcgccaactcctacgaatacggtacagtccgggttagcctgaagtacggactcaacatttgtctgtgcttcgtttgcttccagtccatcaacttctgctacgatcttgtagttgcctttgtcacagttctcttccagaccttctttgataccgtttgctctttctaacagaacctttgtagatggtttaccgataacgcacacctcagccggcttatctgctgtataatgctcattaatgaaagctgacgctgttttaccgatctcatttccaagtgctgtgttgtcaagaatccagttggctgtcgtgttctccatcggatcatcccagcacataactttgattccctcatccattgcctgctgacatactgtttcaagagcatctgcatcagacgggtgaaccatgatcatgtcgcatcctgatgtaatgaagttctccacctggcttacctgtgttcctgcattgtcagagcaatcctgtaatgtgtagtcccagcctttttctttcagcagttcttccaatttacccataacgcctgcccagtagtcattcttcagtgactgaattgtgataccaactttgtagctgtcttttttttcgccgtcgtccttcttgtcgtctcctccggaagtcggtgccttggtcgtacatccaacaaccatcgctgcgatcattgccacgcaaagaatcacacttaccacttttttcttcataatacgttttcctccttgaaatatattatttttatagcttttgctatcagctatcctgtttaggaccctttagaagcacgtaaatgccccgtctacgatgatatcggatcctgttgtaaatgtactcgtatcccctgcaaggtacacgaggatcgactggagctcctcaggctttccaagtcttcccatcggcgccattgcgttccactgtgtgatcagcggtttcagatggtctgcattcatgatcagctcagttcctatgtatcccgggcttatgcagttaacacgcacgcccttctttgcccattctaccgcaagagattttgtcagctggctcactcccgcttttgacgcattgtatgcacactgcggctggggaacattcacgatatgtcctgacatggaagctgtgttgatgatagaaccatgtccctgtttcagcatcacccttccagctgcggtggcacagagaaatactcctgtaaggtttatgtcaattactttctgccactgttcaaatgtcatctcctctgccggagcatttaccgcgatgccggcgttgttgtagcaggcgtccagtttcccgtatgtatcgaccacttttgcgaccattgcctcaacctggtctttctttgtgacatcacactggatcgccatcgtcctggaacctgtggcctccgcgatctctttggcgactttctcagctccctccagattgatgtccacaatagccacgtcggctcctgcttctgcaaatgccgtggccgcgcactttccgattccgctggcggctcctgtcacgtagattgccttcccgtccagtctcatactttcaataatacccatttcgtcctcctcccggctgataaccgttctgcttattattacgttgctcgtgttcaaaaagtatactttttttaacagtctgaatttttattgaaaacgcctgaatcaggcgttttttcatattttactctacagaatcgcattgaacgaaaaagtatactatattagctgcggctacagctgcagccttatttgtaatagttttataaaatgattttataaattcgatttatataattatacatccagaggactcatttgtgcaatatgcaatgttatacaatattttttttgcaatttggtataatttgcataatgttatttatttagcaaacttcaaatcactttgcgatcttcacaacggctttcacgatctcgctcttctcgttgacacttctgtccatcgccgtctgtatatcgtcaaaatcaaatatatgtgtggcgatccctttgaggttcaccttgccctgagctaccgcgtcgatggccatcggatagatatggcggtagcggaaaactgttttaaatgtaacctctttgtcaagcgccaggctcatcatcacattcatcatccctgtcttgccatagccgaccagtacaatattggagcctttccgcactacctggaccgcctgatttgtcgttatctctgtcccggctgtctcgatggcaaggtcaaacccttcaccgccggtcagttccttcgccttttcaagcacatcctcttctctgccgttgatcacaccatctgcgcctaactccattgccttctccagacgtttctccatcacatcgactacatacactctcgacacgccgcacgccttcagggccatcatggatacaagaccgatacatcccgctccgaatacgaccgccgtctgtcctgcgtgcgcctccccctgcttagccgcgtggaagcctaccgcaagcggttctatgagagcgccttccagcgtgctcacattgtcgggaagcttaaagcacagatcctcaggatgtgccacatactcctggaataccccgtcaaccggaggtgtcgcaaaaaacacgacatccgggcagaggttatactttccctctttgcagaatctgcattttccgcacgtcttacccggttccagcgctacgcggtcacccggcttcagatgcttcacgttctttccggtctcaactacagttcctcccggctcatgtccgagaacaaacggaggttccacaatgtaatccccgatccttcccatctcgtaatagtgcatatcgctgccgcagatacctacatactccagctttacgacaacttcgtcatcttttgcctgcggtatgggacgctccgtgtagcccatctctccgataccgttcataaccgcaactttcatcattccgtccatagttttccactccttttccctgtatctctatatagaatttataaaattttcaatgtaatataccgcggcgcccaaggcagatgccgctttctggtacttacaggcacggacatactccccattgccctcaaagatatttttttcttccactcttttttgaagctccttcatatacgggccgatacagcttccgacataccctccaagcacgatatcacagtcaaaacacatcctcagattgtcaactgtaatggccaggtcatccaggtaggtctcccacacttccataagttcagcgtcttcgtcttccagcctgtcaaaaaaccgttccagatagccgtccgtatgctctgccagacagagcgcggaacagtaagcgtccacacacccttttttgccacagtagcatgtctttcccccgggatgtatgaccatatggccgaattctccgctgtgccagtgtttcccgatatacatattctcaaacacgctgttcagcggtcccgaggcgtcttcccgcgccggatcctgccggaataccaccgcccctccaactgtgttgctcaaagaaagatatatcatactctcaagctggctgtccgcaatacattctgtcacagccgccgcgtttgcatcattcagcagtacacacgggtatggaatgtaacgggaaaatacatccccgtctatatcataaagattaagcgctcttgaatacgtgatacggtttgcagtgccgtccacgatcgacggaacagaaatccccactcccgcgatcttttctttcaccgtcccgtcgtctccgagaaattcatccagcgcttcgccaagctgtttaaaatattcatcttcacatacaaaaggctttcgcgtccgctcatacttcagcacagtctccgtcatatccgtcagtaccataccaatatggtgacgtgttatctcaattcctaccgcataccgtgcatctctcaccgccgccagcgccctggcctttctgccgcccgtcgactcaaattccccggcctcacatacgacgcaggcttccctcagttcctttacgatctgcagcactgtaggtccgctcatatcaagcgcggcagcaatatccggcatggaagtcctgttcttactgttgatataacggaaaacgcggttccggttcagccttttcacttctgagttgtttgttttttgtatcaccgatcacccctccttttctctatattttattatacacgcactttccgttaatactttattaaactatttaataaagtctttatttaagtataaatttaccatccattttatggaaagtcaacatgtttttatcgacaagagcaaagaatatggtgattttgccagaaaacccggcattatatgccgggctgtctttccaggatctccgccgcttctgtactgccatatggcgtatttattatccggcggggccattttgaagttttcgtcaatatccgcagtccatcttcatcaagaaaagtcgtctcctcgcacttcgttccgaggatcgtaggattccatgcgtaggcctggcctgtatggatcgtcttgctgctgtccggggttacaatgaattcacggcatccgtatccggcaggccctccctggtggtgcatcttccattccccgccgtatccggcttcccggtataattccatgacattctgaaagtattctttataagtcaacccctcccgcatcatcatctgcatacaggcaaagatatactgagttttctcatatctttccattatatgctccggcaccggagtaaaatagaccattcttgtcagactgacgttcaggccgtacttctctcccccgaggacaaccatcaggctgttctctatttttttcccggtggggacaggatgccggtaggacaggatcctctcatccgatcccacgagcacgcagtccggactgatgccttggctgatgcagcggcatctgagcatattggctgcttccgcctccgtcatgccgggttccgcctccttgcagacgccctccacaatatgcgcgcagagcgcgcctgcctcctcgtaccgccgcacctcatcctccgtaagcttaaggcgcagatccaccagttcctcctgcacatttaccgtgcctgctatccccgtgtcagagacaaaccgtccccgccggatatgatccgcgatatacagctccttgggttcataccacggaatgagcaccggctttcctccgagcgggttctgttcctcatccatacgggagagatcactgctgtccgccagcagatcgatcccatcccgtctgatgacatagtacgccgcgccgttctcactgttgtccactacattattttccgcgcctttgcttacccatgcgtaattatctctccggttcagcagtacgccgtcatagtccttttcttcaagccacgctctgattcgttccacagcatccatcgctcatccctcttctattccatttcatggttgatacatacttttcctgtcctgccggtcgcaaatacctcaaatgccttgtctgtctccctcagcggaaagcggtgcgtaatgatctggcccggatgtattttcttcctgtccagaagttccaccagcttttccatatttcccacagatgtcacccaggagccgtgaagtgtaaggttcttgtgaagcagaagcggactcggttcaaacgtcactgtcccctgctccccgagaaatacaacattgccccacatccttgcagcttccagacatctgtggcgtccaatgctgctgccggaacagtcgatagccgcctcaaccccttttccgccggtcagcttcataatgttatccactgcattgtcatcgcccaggacaacttcgtccgctccggcctttctggccatctccatccgctcctcggagatatctacaccgatcgtctgcgccccaagcgccttggccagaatgaccgccgcctgtcccaccggtccaagtcccatgacaagcactctgtcatttccggatacaccggccctcaaaaggccctggtaagccgttccgaacccgcacgctatcatggcgccgtcctcatacgtcagaaaatccggcaggtggatacatgtggaggcgtccgccaccatatactcagccagcgctccgtccctctgccagccatacgcccgtctctccggctgctgacagttgatgtagaagcctttgcggcattcatcgcagtaaccgcagccctggatatgatacacaacgacccggtctccggtcttaaagtcatctaccttttcaccgacttccacaatctgtccgctcggctcatgtccggcgatgacatcgtcatatctcgcccctccggtcttatccgtatgttcaaaatatatgtacttcagatcactgccgcacaggcttgccgctttcattttcaaaagcacctgcccgggacctggctttggcacatcacatgtgaccggctgtaccttcgctccgcccggcagcttcattcccaacattttctccgaaatcttctcactcatcttcgtatcctcctgtttttaaattaactgatattaaatgtttttttcacgttttgttagttcttatacggattataccattactgatcagtaagctgaattccatatgttattttttgatggactatattacgcttcctcccaccttcctgacggcatttcactccacttaaaaagccacggttttcacccgcggcttaactgcacctgttttacttttgtctgtcctgaacagcgccgttatttccatgttccaaaggcatgataatgtaatgtgccgcttatacgcgccgacacagtaaaaagaagccagtatcctaccgtagacctccggtctcccccggtgctgaccgatcatatccttcatttcttttccctgccgggcgtcgagcgcataaccttcttctgtcgtctcgagatcgttggcaatgttcaccgggccgaccggacccagctcacctctgtcgcccttcgggctctggattccctgtactccctgaggaccggccgctccggtatctcccttgttttgataaaaaaatcattcaggaaatccattcaaagacataatgctgcacttcaaggaaaacagctgactatttgcattttatcttttataattaaataacaaatgcctgggcagcatacggacatttcccgcacaagaaagtacacaactgtcgtctgaaactatttattatctctaatattatttaaggagtatactttgtttaataaaaagtgtttgatcaaaaccgaatctttatcctatgctatcagcatcaaaaacaccttaaacgatcacaatattccatatacagaacgggtagatgcaggcggtgggtggatgcagttcattacattgctgtttgtaagcggaaggggcagttatggactgaacaacgaccgcaaacagacatactctgtctatgtagacgaagaccattatgaacaggcgcaaagcttataagccgtctatgacacgctgtcactcacagtaaaagtagtccccgtttttataatctctcggcgacactccaaccaccttcttaaatattctcgaaaaataatactggtcttcataaccaagctcagagctcacttcatagatatacatatccgtcgccttaagcagcttgcacgcctcctgcatcttcaggtggatgaagaactccactggcgaccgccctgtctgcgtcttaaatatagtattcagataacttctcgacagctttacttcttccgatatctcttccagcgtcagactccgtttcagattctcatacataaaccggatcaccattgtaacgtgccggtcctggactgtgctctcgtctgtcttctccctgaaatagatctctgacaatataagggagagcacctgggatatgtagataaaattcccgagtgtatagttccgttccaacacgcggaacagcagcttgaacagcaccatcatccggttgtcgctctgtctggaattcatatgtaccactctgcattcttctaacggataacagcgcgtaacctcccctttaaagtgagcccacagtatactccacggatcctccggatccgcatagtatttatgcctcctgcctttcgggatacaaaaggcatccgaacggccgatgtggtatgtccggtcctccacctcgatgcacccttttccttccgtacaatagatgaggatatactgctgtgcgccatcttcacgctcacggtagtgggcgcgcgccctcggaaagaatcccacatccgtcgggtagatcgtgcgcacgagcggatgttccgcatagtctgaaaatgactcggtcggaattatgatatacttttcgtctttaaatccatctgcttttccggttatttcattcatcctgaagcgcctgccttctttttcaatatttgtctcggtaatctttggtttattatattctttctgtacaatattgtccatctttttatcatttatgacattttaacctgctgcctgctgtgatactcttgatacagaaagagacactgagaacaatgcagcctgcagctcatgcatatgaaaggagacagaaatgagttttgaaaaagttcacgtatgggaagaaaatgtgaccattcccacctacaaagtgtacccggcggaaaaaagtccattatttatagaaaaccgcgcctatcaggggagtaccggtaaagtgtacccgcttccggtgacggaaaagatatccgacgaaaaagaagacgtgtcataccgcgccgtctatctggaaaacgactatctgctcgttatggtacttccggagctgggcggccgtatccagcgcgccctcgataagactaacaattatgactttgtatattacaaccatgtgatcaaaccggctctcgtggggcttaccggtccctggatatccggaggcatcgagtttaactggccgcagcaccaccggccgacgacctgctccccgactgacttttactgggaagaaaacgccgatggctcctccaccgtatatgtaagcgagatagacaaaatgtacggcacaaagggaatggcttcctttacgctccatccgggcaaagcttatatcgagatcaaaggccgcctgttcaaccggacggacacaccccagacatttctctggtgggccaatccggccgtaccggtgaacgactatacatattccgtattccctccggatgtccacgctgtcatggaccacggcaaacgggcagtatccaccttccctgtcgccacgggagaatactacaaatacgattactccgagggcattgatatctcctgctaccgcaacataaaagtgccgacttcttatatggccgcccattctgactatgattttatcggtaactttgacgaacaggtggacgcaggcctgctgcatgtggccgaccaccacatttccccgggcaaaaagcagtggacatggggaaacagcgatttcgggcaggcgtgggaccgcagtctgacagaaacagacgggccgtatatcgagctgatgaccggagtctatgcagacaaccagcctgatttcacctggctgaagccgtacgaggaaaagacatttacccagtattttatgccctataagcacgttggccgagtaaagaatgccacgaaggacgcggccatcggcgcggagcttggaggcggcagatgtatactgagagcgtacgcctccggcgaatacaaagatgccgttatcactgtgaagaagggcggggatatcctgttcacagaccgggcagatctcactcccgccgcttattatgaattctctttcgcgacagagcttcccgccttgagcggatgcaccgccgaactgcgcgatgccggagggcgtctgctcgtatcctacacagaaaaagcgccggagcttgaaccgacgccggaaccggcggaacctctccttccaccggagcagcttaagacaacggaggaactgtatctcggcgcgcttcacctggaacagtaccgtcacgctacgttccgaccggaagattattatctggagggattgagacgcgacccgtctgatatacgcctcaataacggctatggtcttctccagtacagaagagggaattttgcggaaagtatcacttattttaaaaaggccattgaaaaacagacgtggaagaatccgaacccttactgcggagaaagctactttaatctcggccttgcccttgtgatgaccggagaggaaggcgcagcctttgacgctttctataagtctacctggagctatgagacccagagttccggtttctactggctcgcctgtctgtcctgccggaaaggcctgttcagggaagcacttgagtttgcagacaattccctgctccgcggctggcacaacatgaaagcaagaacgttaaaggcagcgctgctgcgccgtctcggagaagacaatacttctctgctggcagaaaccgtgaagatcgacccgctcgacatgggcacccgctacgagaacgggctgcgccttggggacctgacagaatggaagacaacaatgcgcggtccggctcataattacctggagctgtctcttgattatatgaaggcgggcctgtatgaggacgcgctgcgcatactctcctcctgcccggacacttctccgatgctttcttattatgagggctatatccacgagcaggcgggcagcctgacagaagcagtccggatgcaccggctcggcgaggccgcagatccttcctactgcttcccgaaccgtgcagaagagatacttatccttgaaagcgctgtgcgtctgcttgcagaagctcccctggcgcattattatctcggctgtctgctgtatgataagagggaatatgaaaaggccgccgcgcactgggaagtatcggcagagctcgcgccggactttgccatgaactggagaaatcttgcaatttactgttataataagcagaaggatatagaaaaagcgctgagctgcatgaagacagcgctggagcttgacccgtccagttcccggttcctgctggaatacgaccagctctgcgccagagcggccgtctccgcggaagaaaggctggatctccttgaaagaaaccttacccttgtgacataccgcgacgcgctgtatatcgaatatataacgcttctcaacaataccggccagtacgataaggcactcggctgtctgacgggccaccagttccacccgtgggaaggcggggaaggcaaagtcagcacacagtaccgcttcgcccttaccggaaaagcagtccgtcttcttaagtccggttccttcgatgaagccatcggactgctcgaagccacaaaagaatatccggtcagtctcggggagggaaaacttccaaatgtgcaggataccattgccgactattatatcggcagagcatacaaggcaaagaatgacccgaaaaacgctgaagcatattttaaaaaagcatccgacgggctgacggagccatccagtgtgctctactataacgaccagccgtccgatacgatcctttaccagggatttgcaaatgaagagctcggcgatatggctgccgcgaagaaatgttatcatcagcttcttgcctttggagaaaagcacctgtttgacgatgtaagctacgactatttcgcagtgtcgctgccggagatagaagtcttcccggaagacatcaaaacacgcaatgatatttactgtaaatacttgatggcgctcggcaggctcggcctgggcgaaaaagaaaaggccgctttgctgcttggcggcatactggatgtgaggccggatcatcagggggcggtccgccaccttgccatgaccagataaaaaatggcggcagaatcttcagccagattctgccgccatttatttattttattaattttcccgactcttaatacatctctcaaatatgagaacggtctggtctaccgttgcatttgcgcccacccctgcagcggcgagcaccgtcttgcccgcctcatttgtcagtgcggtgtgcagcctccagccatccatagcatatacggacaacattctctgcagttcttccttcctcaccgtacccgtaagagcagaatccacgatgatctctactttatactcatacagcggatttttctggtactgctcatatcttccttccgccgcccttatgtagtcttccctgctcagcaccttgcggtccgagtaaagataaccgcacgtggggcacacatcatcctgaggatccctcgcatccctgcacacgggacagatttcccaccggccgttctccccgccgcttgcaaactctttttctttgtatttaaaaaaatctttcacatactcgtatccggcagtccctttttctgtctttacctgatctaatacgctctcctggaccatcttaaattctctcgggccgttgactgcctcaagtcttccggctacatttttcgtaaaatattgatgacacttcagacaaagtcctctgccctttccgtcatccgggaattccctgttgatagattccatcattcccagcgtatttccgcacatcgcgcatacgtatttcgccatatcgtcattctccttccagcctgtactttttcacgctatcacaagcggtacattcagttctttcgctatttttacattctcttttgccacttcatcatctgtgatgatcaaatgcacatccgtaagcggacagatcacagaaaggtagcccccgccgaacttgctgctgtccgccagcacgtacacttctttcgccgcgttcagtatggcgtgcttcacctgcatctgcggtgtggctatggaagtcaggcccgcctcaaaattgatgccgtggactccgataaatgctttgtccacatggaagttctgcatattttccagcgccgcgtctcccatggtcgcggcgagatgtccgcccacatgaccgccgaccatgtacagttcaacatgctttgccccggacagctcatttcctacgagaagggaattggtgacaacggccacgcgcttttccggatggttcttaatgtgaaccgccagatagaagctgctggacgcgtcgtcaatgatgatcgtgtccctgtcctcgatgtaatcatacgcacaggctgcgatcttctttttccggtccgtatggcggtaaatgctttccgccgaatatttgcgcaccgggctttcttcccgttttatggcgcctccgtggactctttgcagcaggccttccatatccatattcttgatatcgtttcggatcgtcacctccgaacacccaagttccctgctcagttcagcaacccgcactcttcctttttcgtccagttctctcagtatcgtacgtctgcgttcttccattttactaccctctgtctctgtgatttatataccggtcaactatctcagtctgaccctctgcggatcgatatgctgcgctattatcttcataacagccataaagcggtcgccgaaggcctgcttcggaatgataaacgcgtgttcttttccgtaatatatccctattgttttcggcgtggtcgccacacgctctatcttatcccatgccacattttccgtcttttctccgcgtatgacagtgatgccctcattgtcgaatgtatagttccattctgtctggtattctctgttgagctccatctgctttttggccctgtgcttcagctgaagcggagtgaatgcgatgaatgcggcggcagcggcgagataaaacaaaagatacaccggcgttatcttccccgtggccagcagaataattcccataatgcccaccgcggccccgaggacatttgtcaggaaaccggaaaatttagagtatgtatgatataaaaggaaatcaaacaatgcctcttttgtcatctgtacagtcagcttttcttccatggttatgctccttataataaagtcctctcatacattacgaaatcattgtaacatattagaggacttttttcacttgcttataatgaattgttctattacatctctgacggcgctgcttcacctgtaactttgtagtgtgcccagccttccggtgagtagatacctttctgcttcttctgcatcattttatcgaagaacgccacgatgaacggacagaggaacagtgtaatgatagatgccgtagcgcactgggctgtcgccatatctgtgtactgtgccatggtcgggtccgcttccgcgaccgccgccggtgtcatggcagagttgagcgctgtcgtacctaccgcggctcccatagcgtttctttccttctttggaagaagtaagttgaacacgaagaagaacacaactgccagcgctgctgagataagtccgagtacgatacctgccgcccctgcggtcacgatcgtcttcacatctgtcttggcgccgatggatatcgtcataaagaaggtgacgatcggttgcgcggtcgcacatgctttgcggaatcctgcgtccagattaccccagataaatccgatcaggatcggaacgagtgtagcgatcagagaattgatcggaatagaggcaagtcctgtcgctccaagtgcaacgagtgtaaagaacggtccgtcgttcagtgacaggatagagatcgctcccgtatctgtagcattaccaaactgtgaagacagggatatgtacagagatccgttggaattcgtgatcgccgcgatcattacgaacggtgttatgccaaggaatccatccggtccgcagatccttcctactgcaagcccgaataatattccaagcagaagtttcataccggtcagcgtgacacctttatacaaaggcatgcctacctgcttgatattgatagtggaaccacacacgatgaggaagaatcccatcatcgccgagttaccttcgtagaacagcgccgttacatatccacctatctggaatgcctgcggcacgaatgtcgcgatcaatactgcgatcacaagcggtatgataacaagtccgcccggcagctttttcatcttgttcaaaaggtcaaggtctttcgttttctttacttctgttgtctgttctcccattttctcacttcctccaaattgttattttcttgctgattcacggaacagccggctcacaatgtcacaggctgtattatcgttgcctgtcagtcccccttttcccacgacagggagtccgtcatagcttcccaccaggcgtccgacgtccgtctgcggtatgacataatccattacttctatacactcaacaccaagctggtaacaaacgttgaccatcgtatcaccacctgttgtgtaaagtcccgctactttctctctgccggcctgctcaagcacctgtgaaatgatcgtgccgagtcccgcgttgattctgttggcgctcataccgccggcataatgtctcttgttatcttcttcatccagattcaacagctctccgtgcagcgctgtctcaaagaggatcgccctcggctgggtctcggattccatcagctctaccgctttatgtaccgctttgaacgcttcgtccatggccgcgtcgccgccttcaataaggggaagcgggtctacgctgatgcggacatgtcttttgtcctcacagagtacctccatctgtttctttgtgactggtgtcgcgctgcctgccgcgataagtaccgtcttgccgttctcatcagtctcaggcggaacatttggctcttcctccttgatcagtccgcggtggaaagcaagctttgacgtaaacgggcccggatccactgccactacattccagcgaagttctatacacgctttcgcaatttcttctacatccccgagcgtgatcgcatcgaccactatgacgccgcatcctgcgtttctttcttcttccagcgctttcctgactgcctcttctccttttaatactttatcaagcgtcacgaggccgaccttgcgttttgtctggccacagagcagccttggtatataattttccttaaccggggtgcgcacgtcctgtgccaccggggtattgacaagtgccacaccgtcgatgacggaataacctccaacgagtattcttctcgactgaggcatggccgggactacaactgcgaccgcatcttctccggcggtatccagcattgcgtccacttcgatcccgactccgccgcgcagcgtcgtatcgatacgtttcgtaaaatatttaactcccatgcgcttaagcgcctgtgttccggactttactttttcgtatgcttcgtttgccggaagcgctctgctgttgctgcttatgagaactgcatccagctcatccagcccttctgctttttctgccgcttcctcattgaaaaataccgccgtccttgcttttgaccttgcaagcagcacacccgtggtggttgccccggtcagatcatcagctaccgcaccgattaaaggcatctttatccctctctttctataaacacagtctcttagttttcttctctttcatgctgttttgcagcatactcggcaactactttcgtagattcgataagacttatggaacctgcgatgcctttacctgcgatgtcgaacgctgtgccatggtctacggaacttcttatgaaaggaaggccgaaggtgagtgtcacggatttttcaaaatccagtgtcttgcaggcaatgtgcccctgatcgtgatagagagaaaggatagcgtcaaactttcctgactttccgatattgaatacagaatctgccggacaaggccctaccgcgttgattcctttttccttcgccgcctctaccgccggtccgatgtctgtcagttcttcagtcccgaacagaccgttgtctccgttgtgcggatttaatcccgcaaccgcgataagcggattctcgattcctactttgcggagctctttatcgatattgataacattttccaggatcacgtctttggtcgcatagtggcacgcgtccacaagagacatgtgacggctgacgaaaaatactctcagtttgtggcaggagaacatcgtcagtgcatacggggagtttgtcgcgttctggtagatctctgtgtgccccggttcttttacacctacgagtttgatcgcacctttgtggatcggtgatgtggacactgcatcgatcttcctggccagcccaagctcaatggacttcatgatccagtcgatcgccatctggcctgccagcttctgctcttttccccattcaatggaatccgtgtcataatcgccggtctccattatatctacaacgccgtattcgtactttgcctcggaaggatctgagatcaaattgtactgaagctccttgccaagcactttggccgctttctccatgatcgccctgcttccgatcacaaatggcttgcagcactcgtggatctctttgctcagcatcgtgcctactactatctccggtccgatacctgccgggtcccccatggtaattgctgtcactggtttgaattgctcgctcattttcttcattcctttcatttactttcgtttatgtttttgttttgtttttcgtttttctttctttatgtcttcatattacattcgtttcttttgatatgcaaccgttttttgtaatttcagtacatttacatattttcaacaatactgttttgtgcattttaacccggatttttatatatgtttttcgtttactttcgttttttcgttttgttaattatttcacggtttaaagttgcgttttcacgtattatcatatataatagactcagattacagatcagtttacatcagattcgcacaaggaggcagtcatgcagaaaaaattatattttggaagtaacttaaagatgtacaagaatattcacgataccgtggagtaccttcaagatctcgtagcgtacacaaaggatatcagccgtgatgaaatcgagcttttcattatcccttcctacacgacgctggaaagcgccacaaaaaatgtggaccgtacatacgtaaaactaggggcgcagaatatgtgctgggaagatgaggggcagtttaccggagagatctctccgctcatgctgaaagaactcgggcttgacctcgtcatgatcggacattccgagagaagacacgtgttcggcgaaacagatatggaagaaaataaaaaagtaaaagcagcgcttgaccacggatttacaactctgctctgcatcggcgagaccgcagaggaaaaaaattacggcatcagcgcggaagtgctccgcacgcagctcaaagtcggatttcacgatgtacccaaaacacagattccgaatatctgggtcgcatatgagccagtgtggtccatcggagtcaatggcacaccggcaacggcagactatgcggaagaaatgcacaaggtgatcaagcagacactgctggagatcttcggcagcgccggagcagacatccccgtattgtacggcggcagcgtcaatccaggcaacgcgaacgacctcatcgtacagccgtccatcgacggactgttcacaggcagagccgcctggcaggcagataagttcgataaactgatccgcgatgcaaaaaagacatttgagtcattgtaaagggacacgttaaaacgaattggggacgggggaaatctagatttcccccgtccccaattttactcaattttacatttcgtataattcgatcatattattgactctgttttttataacagaagggtcaaatggtttatgtatgatctcacagatacccaggtccttgatacgctgcattttaaccgcggagttctcggcggtgatggcgattaccggtatattatccagcaggctccggcttctggcttccttcatcatttcaatcccgtccatgacaggcattataacatccaaaagaactgccgcgatttcatccccgcgggagtcaaggtgctccagcgcctcctgcccgtctgccgcctccaggatcccgaactcgccgcgcagcacttcttttaatatgacacggttcatctccgcatcatccacgaggagcacaaggccccgctccttctgccgcgtcgactgtggccggccggccctttttctcttctggttctccgtcagtctgatcagctggtctacccggtttgtaacaagataagggtcaaacggttttgcaatcacatcacagacgccatattctatcccttttaaaatattttccttataagtctccgccgttacaaatataatgggtatatctttatactcgtgtatctgctttacccgctccaggaatgcaaagccgtccatgacaggcattatgatgtccagcattataagcgctatattcctatactctttttccagtatcccgagcgcctcaagcccgttctctgcctcgagtatatgatgatcatttcccaggatcaccgagagaagctgacggttcatccccatgtcttccactatcaaaattgtctttttatttatattgtccacattatccacatcctgtccctccatatttctcttctattataaactatctggaaggatttacaagtgaattggggacgggggaaatttaaatttcccccgtccccaattcggttttaacgtgtccccttttatccttctatgaattctctcatgccctggaagatgagccatacggatgtggctcctgcatcctggtatccgatggcgcgttccatcagtgattttgcacgtccgaatttggccacatagttcttcgtatcttccacgccctgtcttgcggcttcttccgcagccttcatcatctcgagcaggcctttgccgctgttggcttccattgcctccacggcaggtgccagggcgtctaccattgtcttgtcgccgacttctgctttgccccgctcttttattgctgccaggctctttcgttccatcttcgccagttctccggctgtgatggatgccgccggctctgtgtccctggcgcctgccagatacaggcttccgaagataactccggaggcgccgcccatggacagcagcatcgccttcccggccgcctcaaagatggcgtatacgttctcctcgcccttcatcctgagcagtttcgccctggccttcttcatgccccctgccattccgatgccgtggtcgccgtctccgatggcgctgtcgatctccgtcagatacggcttctttgcgatcactttgtccgctatgtatatgagcatctctctcgcatcttcagccgtaagctcagtgatcggcccttttttcgacctcgaaagcaccggttcttcttcgcccccggcctcatccccggtatcctccggctctgcttccgcctcttcgtcctccgcctcgtacgcgctgcccgtcagctctcccttggcatagtacggactgtaacaaggcatatcatagtatttcttaagctcttcatcgagccggaacagcgtaatggaaaatccgcccatctcctggctcgtacaatagtggttcaagtccgtatcatatactttgacgccgtccttatcgagaagctccttcaccttacggaatacgatcgcaagctcggttatcgtcgtggagccaagtccgttcacgagcacacagacctcctccccttccccgagccctgtatcttccttgatctgctcatacatcttctcagccagtacgtccgcaggctcccatttcgtcctgagtacgcctctctccccgtgcagtcccatcccgtattcgatctcctcttcgccgagttcaaatatgggcttgtccacaccgggaagctgagccggggcggtggccactcctatggtgttcgtattgtcacgcgctttctctgcgatccttgtcacttcctccaggtcaagccccgcatcgcacgcagctcccgcggtctttacgacaaatacatcccccgcgatcccacgccggtctgatattctgtccctgggcgcgcttgccacatcgtcccacacacggacgtgcgccgtcctgatcccgtcgtcattcagaaattcttctcccatgtcaaagttcagattgtctcccgcatagcagccgtatatgaacagaacccccttgccgttatccaccgcctttgccgtctcatatatggtgttcgggtccggagacgcaaatatattgccgcaggcggccgcatccgccagtcccttaccgacaaatcccgaaaacataggctcatgtccgctcccgccgccgatgacaagggccaccttgtcctttctcctctgctttaagataacaccgttcacctcaggatgctttctgtaatatctgctgtatgcgctgacatacccttccatcatctcctgtactacattgtccgcatcattgataatctttctcatcgttcaacctcttttctgtccatattttatactcattatatcatgagcacagctcatgattattgtacattcgccaaatgcttcgcgcttggctcattgtgttcattatatcatacgaaataaacctgcgtaatcatccctgtatcattccacaagcttcatcatgccctcagcccacagtccggccatccgcctgtgcccttcttcggaagcatggatgccgtccagataaaatgacgcggcaccggcaggatcatctggaatactctgacggaaatctatgagcggcacaccgaagctgtccgcaaatgccatcagccagtcgctgtattccccgagcagccggccgacgcacactccggacgcgaacgccttccatttgtcagaaagcccggcttcatacacaggaagcgggctgccgatcaccggcctgatcctgcggtgcatacagcgaaataccattgccgccatattgcattttgcctctgcgatacttcctgaaaaaaagatgtcattgctccctcccatcacaaatatcacatccggcccgctgcctgccgcgtctgtctcaaatctggacagcatgccccctgtcgtatctccgtttattcctttattgacgatctcacttccaggcattgcacgcgaagcaagggcggtccagacggacgccctttttactccatacccatatgtaagactgtcaccaatacagacgattctcatgcacattcctcctgcctcattccggaacacagcagatacaggccgcgacttcatttgcctcgatcgttccgaagtaatcccttatccggaactcctgaagcacctccagcacctcctcgtaccggtatctgcatcccgtaagcctcccggccacctcagaggccggccgcagcgccataaagtctccgtacatcagacactcttctatccggccctctcttacgttcatgtatacttccaccgtgccgccctcatattttttatagttatgaatggcacagtttatcggctgtccgtaattccattcccacgtctcatatttttcccgcttcagccgttcaatctgtacaagctccttctccggcagcttcagcatatcataaccggagtcctcgagcatcttttccgcaagacgctcccggaagacgtccatcgtgatctcatccggcacataatcctttatattgcccacacggctttttaccgacttcaccgctttggagttaaatttttcgctcctcacattcaggcttttggatacgacagataagtcagaatcaaagagcaggcagccgtgatgcaggatccggttcctgtagattctctgtgcagtgccggacaccttcctgtcttctatcataatgtcgttgcgcccgctgaattccgccttcgcccccagttctctcagcacctcgatgacaggtcctgtaaaatgcttcatctcatcccggccttcctctcctctgtccgcaatgacagagtagttcagattaccaaggtcatgatacacagccccgcctcccgtcgtccttcgcacgacccggatgccgtgttccttcacaaactgctggttgatctcctccatggcattctggtgtcttccgaccacgatcgtattgtcattctgccagagcatgacaatgacaccttccatatgatgcgtcagaagatattcctccagtgcaagattataataaggatcggtacaattatttacaacaaggtaattatttttcatactttttcgccacctggtataaatcagtaaaatcattcttcagatgcgcatataagttccggtatatttcaaagtattccatatagcgctcatgcgtctcctgattcggttccatataatcaatatagtttactttttccttggctatcgaaaagtcttcaaacacgcctacgctcactcccgccagaatagcatccccgtaaggcgctccgacacggttttccacaaatgcggtcgggacattgaacacatctgtgatgatcctcctccagagcttgctcttcgcccctccttcattgaggatgatcggcgcatttgccttgatccccttctccagcataagtctgtaattatcatacagcgcatatgcaacaccttccatcatggcacgtatgagatgcccctttgtgtggtggagcgacaggccgaacaccgtccccctcgcatatgcatcccagagcacggtgcgctcccccataagatacgggagcacgataagcccttcactgccggccggcactttctctgcctctttgttcatgatatcatatacatccatatctgacatcagttttgcggtggcatgttccatctggcagaaattatcccggatataccggagcacctgtcccccagtgagcacgacagctatggaaatgaagtcgttgcaggaattggtcgtataggcatcattgcacacaagatcaataaattctctgctgtcatttacaacacccatgacaccgcacgttccgagattgatctgcacatcgcccggggcgatggcgccgccgcccacaaaaccggcattgcagtccacctgtccggcgcagaccggtatgcccggcacaagtccaagttcttctgccgcacgttccgtgaccgtcccgacgatatactcgcacggatacagatccggcataagttccatgtcaatgccaagcttatccatcagctccctgttgaactcttttttcctgatatcatacgcgacaccccagaaaccgccgtgggaatagctcatggccgcccggcccgtcatgcgcagcctgacaaagccgtcgatcgtcagcgtcttccagatcctggcgtaatcgtccggtcggttattcttctcccacatgatattcaccatggtcggataatcctcgatccggttgccgttaatctgaaatatctcatccaccccgatctgttccctgagccactctacttccttaacggcccgccggtccatcagattataagcgcggttgataggacgtccgtccttatcgaccatgacaaggcacggctgcgctgatgatatgccgatcccccggatctcctggggtgatatgcccgccttcttcatacagtctcttatcgtcccgcacgccagtgtccagtaattctctgcatcgtgctcagaccacgaaggtttgtctacgtaaatggggtactcctggaaggaatatgcgagcacgtccgcatgttcatcaattatacacgcctttccgccccccgttccgtagtcaaggcctatcatatattttcccatactgcttcctccttattttacagctttgtgcacgctctttccaaagcagtcaagagccgcttccctgatcatttccgacagcgacggatgtgccactatcatcctctcccactcgtcaagtgtcgttttgttcctgaccgcctcggaggcaaacgcgatcatctccggggcattttcacctgtgatatgtacgccaagcgtcgtcttcctttctctgtccatgacgacccgcacaagaccgtccgccccttctgccagcgccatcccgttggcgctgtaggcaaattctccggtcaccgccgcaattccttcttcttcggcttttgccgcgctcattcccactgccgcaaaggccggcatcgtatagatgcatctcggcataacgcgcaggtctgcaggctccctgcgggaggtgatgtttctcaccgccgcctcaccttccgcgtaggcggcgtgcgccagctggtatccaccggccgcgtcgccgatggcatagatatggggcacgctcgtctccatgtattcatctacctgtatctccccctttgcagtgagcgcaatgcccgccgctccggtatcgatcccgttcagattcggctttctcccggtagccataagcacaacatccgcgtcagcctgtccgctttcttctccttcgtaaatgacccggaacccgtcttttgtcttctccaccttttggactttcgtcccgcacaatatatgtatgccccgctttttaagcgagcgggtcatgtatgccaccgcctgtctgtcttccgccgggaacagctccggaagcacttcgatgaccgtcacctccgaaccgagggaactgtacgcgcttgcaagctccataccgatgactccccctccgatgaccacaagccgcgccggaaccttttccagttcaagcgcctctgtgcttgttatcgtatactctgccccctgtatcggaatggaagcggagacagaaccggtagcgataatgaggtctcttcccttatacacctgtccgccgcactctgcctcgcccgaagcggagacgctggcaaaaccgcgcactaccttcacattatttgccttcagcagatgatccacacctgccacgagcttatccaccacttccttccgtcctttctggatcttccggaagctgaacagcccgcattctttaaagatattctgctttgtaagcgcccgcaccttctccatggccgccgccttgtcaagcagatactttgtcggtatacatcccacattcaggcaggtgccgccgatgtgcccgccttcaaacaatacgacagacagccctttctttgcggccgttatggcggctgaataaccgcccggcccgccgccgaccacgatcagatcgaactcttccttcaccctgttatcttccattttcgcgcctcccttatctacagcagtgccattgccggatcttctatcagagacttcaattccgccaggaactgcgccccgtatgcgccgtcgacgacacggtggtcgaagcttcccgtaagattcatcaccggaaccgccgaccattgtccatcttcaagcaccggcttttcctggacggcgcccacggccagtatgcacacttcaggcgggttgatgatagcgtcaaactgtgtcaccggatacatgccgaggttagacagggtgatcgttccgcccgacatgtcatcggccgttaactttccttcccgcgcgcggcttatgttggccttgttcgcctcacatatctccgttatatttttttcatttaccgctctcacgaccggaacgatgagtccgtcgtccacagatacggccaggccgatattcacatccttatgcagcaggaccgcgctgtctgtgtaagaagcattgacatacggatactttcgcacagccgcttccatacatttgaacaaaatatcattgtaagatattttaaagccggccttattgtcattgactttcgcccggaaggcaatgcaccgctccatatttacttctacggtcgccctgaataccggaatattctgtgaactctccagcatcctgcgggcgatcgtcctgcgcatcgaggtgagcggcacttcagtgacagctgcgccttctgctgccgccctgcgcggcgcgtcctcgatgtagatctgtacatccgaacgtttcaggatatgctttcctgtaaaggccgcagcatcgctgagggagatcccgtgctctctggcgagcagtttcgcgttcggcatcgcttttacttcccctgtatccgtatgtacggacggcgcctgctcctgctttggcgcggacgcatagcggacaggtccggacggatcgatgggctgatattcgtcctcctcttcttctgtctgagacaccggcatcgcggccgccccatgacctgaagcgctgcctcctcccgctctcgcctctgcttcctgtctgtcgctctcatcaccgatcagcgccagaacctccccggcagcggcactgtctccttcttctaccaggatcgcaagcaccgtgcccttggcaaagctttccactgagagggtggccttatccgtctccacggtgagaagctcgtcgcctcttttgaccttatctcctttttttaccagccaggcgcccacggtggaagtgtctgtcgtctgccctccggccggcattgttatctcttttatcataattttctaccaccttaaaatgctttgttctctccgttcagtgcgcagatcgtctcttccacatacgcgatgaccgcttcctgctccttcacgatcatatccttgccggcgcctcttccgaggacgtcattcggatccatgtggtccacatcatgttctgcgagataggctttcaccgcgttgatggccgcccgtttcatccccgtgccaaagttcacctttgccacgcccatcgccgccgctttggacagatcttcgtgagcgatactcgtgccgccgtgcagtacgagcgggatatcgatcgctttcgcaagtgtttggagggcgtcgtagttgatcgtcacttttccgtcttctttcaggtgacagttgccgacggccacagccacggcatctatgcctgtctctttcacaaagctgcggcaaagttcagggtctgtgtcctctccttcgtgaagctctcctgtcgctgagttgaaaagcggcagctccccgacttccccttccacggccacgccttttgcgtgcgctttctccacgatccgcttctggatctctgtgagttcctgaagcggaagtgcgtcggaggcgaatacaggggcgaacatgaccatgtcaaagcctgtctcggccgcctcgatgaccatagcttcatcatccgattcattcaaaagcagcgctaccggaaccttcgcttcctccgctattttagacagcatggcataatacacggcaagactttctttgtaacgtctctttgcctccccgacataagtgccgcacacaccgatcatgaccggtgactttacgttttccgccgccctcaccatcgcaagtgtagactgcaggtcccagctctcaaaatatccgactgcgtatttattttcaagtgcgtgtccaagcaactctttcactgttattctgctcataattttttcatcctttcacatcgtctcttgttgttaaaactctaccagctcccgcgccgcatccataatacgttccgtacttggaatcacgaaattctccattggagacgcaaacggcaccggggtgtcatatgccgccacgatctttacaggtgcgtccaggtcaaatatattgtgctccgcaacatgtgcggcaacctgcgctccccatccgttgttctgatggtcttcatgcacgataagcagctttcccgtctttttgagcgactctgtcactgtctcgtagtcaaacggcacaagcgttctcgggtcaatgacttcgcagctgatcccttctgcctccagcttctttgcggcctcctgcgcgcggtagctcataagaaggttcgcaacgatcgtcacgtcgctgccttctcttcgcacggcggcctttccaaattccaccgtgtagtcctcttccggcacatccccggatgttttgatggcgtctttttcctttctcgtccctccgtacaacagcttgtgttcaaatacgagcaccggatcatcgtcccagatcgcctgcttcatcaaccccttcgcgtcatacggcgtggacgggcagatcactttaagtccgggcacgtgtgtaaaatagctctccagactctgggcgtgctgcgcgcctcgattcgtcgctccgcagggcgccctcatgaccatcggcacatgtacggtcccaccggacatgtaacacattttggccgcctggttcacgagctggtccatcatacagaacaggaaatcaccgtactggaggtctgccaccggacgcataccggtgatgccggcgccgacgcacactcctgatatgaggatctcggcgatgggtgtattgatgacccgctccggcccgaattcctcaagaaggcccttcgtcaccgtgaacgcccctcccattccaccttttatatctacgtcttccccaaggcagaagacggtgttgtctcttctcatctcttcctggatcgcctgttttaaggcatccgctatggacatttcagccattatgcatttcctccttcccagtatacgtcccggagtgcagactccggttccgggtctttgctgttctttgcatattccacttccgcttctatctttgcttctatctcttcttctatccggatcagttcttcttcactgatgatctcttcctcaagcagccgcttcctgaatgactgtaccgggtctctggaaaaccactctttctcctcatcctccggccggtaaccgcaggcgtcatttctcgagtgtccgccaatgcggtacgtcttaagctccaggatcgtaggaccttccccttttcttgcgcgttcgatcgcccgcgcggccgcctcgtttacagccagtacatcattgccgtccacgacttccgccggtatcccgtatgccggccctctgtccgccgcaacattctcaagattacaggtcatcttgatggaagtcgttgcagaataaagattattttcgcacacatagacgaccggaagcttccacaccgcagccgcgttcagcgcctcgtgaaaggcgccctcattgctcgccccgtctccgaaaaagcagaccgccacattgtctgtcttcatcagcttgcaccggagcgccacgcctgcggcgatcggcaggttcccgcctacgatggcgtttgccgtgatggcgccgaccgaaatatctccggtatgcattgcgccgccttttcctttgcaacatccttccgctttgccgaacatctcacacatcatggagcgtaagctgactccttttgccagatcatggcctgccggcctgtgagtcgtcaatatgtaatcctctttcctgagatcatatatcatccccaccgcgcaggcttcctggccatgggactggtgaatcgttcccggcatgattccttccagaaacagataataaatagtttcctcgtactggcggataaggtacatatccctgtacattccgaccgcccgttctctttcaggcattttctgcataacgcactctccttgtcattgtataatcaaaataaatataaaagtaatatagaaaagctatttaacatgttaaactctatgctcttattatattttcaaaaagttatatattcaacattttgagccgtgtgtgatgttcgtattaaaacatttcagactcatatttgttcatttataaacaaaatcgtatctatttgggttgtcaaacagaatgcgttgttataaaataaacagatagacaccgcacatgaaaggggatttgagatgaaaaaagaacggcacgcccggatcatcgaactgctggagaaccgtatggtatgcacaccgaaggaactggcagacgaactcgcctgcagtgaaatgactgtcagaagggatctgaacgaactggaggctatcagcctcgtacgcagaaagcatggctgcgccttcctcgtgaaagccgcaaaaccgaattattttctcgaacagatcgacgagcagcagtatgaaaaggaagcgatcgcaaaggctgccctgcagttcgttcatccatacagcgtcatctgtatagactccggcacgaccgcccacacggtctcacgcttccttccggacaacattccgctgtctgtcataacttctaatctcatgactgcggtagaactgtccaacaaggagaacatccagacatatctcgtcggggggatgctgtaccacaggacaaagtccatcatgaccgaatccgccgagctgctcacacagcaccccgcggacgtggcattcatatccgccagagccttccgcatccccggcggcgcgtttgagcacacctacccgctcgtggccacaaaaaaagcgctcgtgtccattgcccggaaaacggtacttctcatcgaccacacgaaatgcgagcacgtgtcgctgtgcaattcgatcccgctgaaccagatagacgtgatgatcacggacaacaagacgtcgcccgagatcatcaagaaggcggtggggcttaaaaaagaagtcattgtcgtcgatccggagacttctgccattgagcatcattacaaagtataagcccagccgcctaaagcggccttgccgataacctgcaggaccttctattcttccgcgtagtttcttcctgccacaagagcgcttccctttctgtcctcttccggcacaaagctgtcgtcgctccaggctgttatctcaactttgtcatcttctgatacctctacgatattgagcgccgcgttgcctatcggttttacctcccacagctcgttgaccgctctgccttcaaaccgcatcataagaagtgtcagacatatcatgtgggatgttatgagtatcgtttttcctctgttctcatttacaattctccagaacgcatctgtgatccgctccgacacttcctggaaggtgtcccctccttctatcctgatctcttccggccggctcccccagagcgctatctggccgggatacttttcttccacttcattgccgtccagtccttcccacgctccgcagcatatctcccgcagtccgtcgtcggtccggacaggaagagcgcggtctcccctgatgatctctcccgtctcataagcccgcttcatagggcttgagtagatgacatcgataggttcctccttcagcgcttccttcgcatacccggcctgccgtctgcctttttcgttcagcgggaggtctacgcttccaagaaatttacaaagtacattccactccgtctcaccgtggcgtaccataataacttttgtcttcataaatctttactccttttccgtcttttttgacggctccgtaagcctgcatctgtccgcaagccatgattttacattgtcctgtgtcacaagcagacgcatttcttcttccggtactgcctccagcagcagatccacatttgcaaatttatattcgtctgcatacgcttccagcgctgtttggaaatcttcttcgtttggctttaagccgtatttatttgccagcacttccgctgccagttcctgcttgaccgacgccttggccgctttttcaatatccttgtccgtcatgccgagggcctccatataggcgtcgtactctgtgcccgcctcttttgcgtaatcttcgtactggcttttcagattctcttccacttctttcagacggtctgcgggatatttcttcacttcactgttatcaatgactttttcccacactttcgtctccacctttgtccgcgccgctttttcctttgccgcgtcgatctgtttcttaagctccaggcggtactgctccaccgtctccgcggtatcggacagcgtttcctttacaatggcgtccgtgatcttcgtatcttccgggagatcatgctgagccgtatagccttccatcatccttgccacgaccttgtctatctcttcgtctgttgtgtcggtgacttccgctttttcaacttctattccttcgtatttatcaatggttatatacttatctgacagcctgccggagcacccgccgagcataagcgccgccagaatcatcgttaaaagtgctgtttttttcataatacttaccccacagttatgtcggcagtgtccatcactgccttttttattgttttaatcttcattttacaggagcacgcaacaacaagaattgcatcacatatcttttggcccggttgtcacaacttgccggatactaacagccaagctctctgtgaaggtagtccatcgtctttttcatgccgtcatagaccgcgtcgtcctcgtcttcaaatattgtgacaacttccagatactgcatgacatcgtctagtcccgcgtctgccgtggcgcgttttatcagttccggcgttacgatcccttcttttgtaaagtcccagtggcggtcccactgaccgtccgtctgctgcagatggatagagccgatgtaaggagcgcacgtatggaaccacagctcaatgtctgcttcttccttaagcagcggtctaaagagcgcatgcccccagtccaccagaagcctgaccggaatatccgtcccctccagatccttcatcatcttgaccgatgcctccgggctgtggggaaattctgttatgagaggggtcgcctcgatatgtatctcctctatccctttctctttcccgtaggaggccaggcgtcttacataatcgagcatttcttcgtacaatgcttcccgcctggcaggatctaacgcgtcatcgtatgacattccgcccaccggcgtccccatcacctttgcccccatgactgccgtcaggtcaacggcccgtttgaagaagagaaacgccgcctccctctgctccttcgacggggcgagaaaatgcccgtaggaataagaggccagcccgccgaacgtggcgtctatatgcacgccggcttttgcaaatgcgtctctgtagtgcagcgccagtacgtctcttaattcttccggccaccacggatcgatcagatcccatgtaaactgtacgtgatccgtgccaaagtcatttttgcacatgaaagccagcttttccggatccataaaacgctttacggcaaatgacagatttaatcccagtttcatatttattctcctcgcattatatagtattagtgtttataacccttcttcccgaaactgtatgtggtactcacctgacgctgccgttaagtttccgatgtccgggcatctttagaaaatgataatggggacagtcccctccatgcaaaaagagactgcccccgtataaagaatgagcgaattctctccctttataccgtttttatgtacagtttatacaaacttgactactgcttttattacttcatccttatggttgaggctgtagtcgattgcttcgatacagtctttgaagtcaaattcatgagaaacaatgtcttttacaggaatcgcacctgaggaaacggctgagatcgcttttggccagagatttctgtagcggtacacagagtataccacaccttccatggcgttcagtgtcgcaacatccagttccagaaccggttccggtgataccccgacgagggtcacctttccagcgcgtttgatcagtctgcatgactgcagcgttgtaatgcggttgcccgcgcactcatatacctggtctgcgccgccgcccggcagtgtcttggcgaattcttctatactctctctcgtgctgttaaatactcttgtcgctccgacttccagcgctttttcaagccgtttgtccatgacatcagctacatagatctcgctgacccctcttgctttcagactcatcactgtacacagtccgatacacccgcttccgagcacgatggcggtctcaccgattcttgcgtccgacagctccgtcgcatgcatgccgactgccagcggttctatcatagcgccctccagcgtcgtcatattgtcagggagcttgtagcacatgttcgcatcgtgcgtacagtattctgcatttactccgtctctttcccccggaatcgcaagcatcttgatatttttacacaggttgtagtttccttttctgcagtcttcgcactgtccgcacggcactgcaggctcgatggacactttatcgccgaccgcaaatccttccaccccttctccgattccggtaactactccgcccggctcatgtccgagagcgagcggaccgtctagtgtccagttcgcaagctgtccctcctgatagaagtgaaggtccgaaccgcacacccctacatattcaagcttgatctgaagctcgccttttcccggctgcggtatatcgcgttctacccattccagcttttgttttcctgtcaaaacacatactttcatctttccttccattattctctacctcttttcttttttactgagtgcttttacctcgttaatatagttccaactgctgctttccagccttcatactttctatccctcaatgcaccgtccattttcggctcatattttacccgctttaacttattgaaaatgctttcgtcccacacgccgagggcaagtcctgccgcgtacgccgggccgatgcccgacagttcttccgaatccggcacctgcaccgccgcctttgcaatatcgctctggaactgcatcaggtagctgtttctcgtcgggcctccgtccacacgcagttcctccactttcaccttcgcgtcctcgctcatcgcttttacgatgtctgtgatctggtaggcgatgcattccactcctgcccgcgccacttccgctcttcccgtcgtcctcgtcatcccgacgatggccgccgccgcgcggctgtcccagtacggcgctccaaggcccgagaaggccgggacaagatacagccggtcgtccttcaccgcctcccgcgccagcgcttccgtctcctgcggggagctgatgagtctcaagtcgtccttcagccaggtgatgaccgctccggtgtagttcaggttcccttccagcacgtagttcaccttcccgctcatgctccacgccagagaggtcacgaccccgtgggtgctgagcaccggttcttccccgatgttcatcatgatcgaggagccggttccgtacgtggactttatcatgcccggcttccggcagccctggccgaacagggagccgtgggaatcgcccagcaccccgtgtatcggcacgggcctcgggagcagcccctcaaagtccgtctctccgaagtcggcgttggagtcgcacacctcggccaggttggccgggtcgatgccgaacaggccgcagatctcctcatcccagcgcagcgtgaagatgttaaagagctgggtcctcgatgcgttggagtaatccgtcttgtaggacgttctgcccgtcagtctgtagatgagccagctgtcgatggtgccgtggcagatatcgcccgcggccgccttctcctttgccccgtccacgtgttccaggatccaggcgatcttggaggccgggaagtagggggacaggttcatgccggtcctggcgcggatctgttccgccgcgccgagcttctccacccgctcgcagatatccgcggccctggcgcactgccagacgatggcctgcccgagaggggcgccggtggagcgctcccacgcaagggacgtctcccgctggttgctgatgccgacaccggcgatctgctccttcgcaatgccggactccgtcacaagccgcgtcaccacctcaatggtattgcggtagatctcctccgggtcgtgggagacccatcccttttcatttacgatctgcctgtggggcttatccgttctccggatgagacttccgctcccgtcaaagagaagggcctttgtcccctgcgtgctctggtctatgctgataataaatttgtctgacatcttatccgctcctatcataagggtttcacgaaaggggtcagacccctttggccataggggtctgacccctatgaaaattctacaaaacttcctttattgtctttacaattccttctgcatccagtccgtaatactggaacacttccttcgatgtccctgtgatgaccggggcgtccggcagtgacaggttcacgaccttcttcgggcattcgctccctactacctggctcaccatggagccgagtcctccgtacggcgcgtgttcttccaccgtcaccactgccttggcgttctgagctgcctttacgacggcttctttatcgagtggtttcacgcagtacatgtctaccaccgtcacgctgatcccttcttctttcagcttcgccgcggcgtccgccgccggcttcaccatctctccgcaggcgatcaccgccacgtcgctcccttctgtcacgaaggtcgctttatccatctcaaacggcacgttcccttcttcgtacacgtcgtccaccgcgttgcggcccacccggatgtacgccggcttatcatccgccagcagcgctctcgtcaggcactccgtctgcagacggtcgctcggcaggtacacccgcatgttcggcaccgccgccatggccgcgatgtcctgggccgagtggtggctcatcccgagcgcgccgtagctcacgccgccgctgatcccgatgagttttacgttcgtgttcgagtacgccacatctatcttgcactgctcatagctccgcgtggagaggaagcaggccggggacgccgcgtacggcttcttcccgcattttgcaaggccggcggagatgctcaccaggttctgctccgcgatccccgtctccacgaactggtccggcagctcgttggcaaatggggtgaacgacgcgctcccgcgggagtcgctgcacagcgccaccacatctttatctttttttgccgcctccatcaggacttcacacatcacctgtttgtttgccgtcttagccatgaagcgccgcctcctttctctctgccagatcttttctgatctgcgcaagttcctcttcattcgggaccttatgatgccagtttgccttgttctccatcacgggagagcccttgcccttcaccgtgttggcgatcagcacggcaggcttccccttcaccgtcttcgcctcctcaaacgccgcgtgcagctgatcgatgtcgttgccgtccgccacgtcgatgacgtgccagccaaaggcgccaaacctttcatgcaggtcgtcgtgtcccatcacatcctccgtattgccggatatctgcagccggttccggtccaccaccgcgcacaggttgtcgagcttatactggcaggccgccatggcgccctcccacacagagccctcggccagctcgccgtcgcccatcaccgtgtacacccggtagtcctggccgttcatctttcccgccagcgccatgccgacgcagaccggaaggccgtgcccgagggagccggagttcatctccacccccggcagcttgttgttcgggtggccgatgaatttggagccgaacttgctgaacgtggagatcagttcctttttgtcaaagaagcctttctccgccagcaccgcgtagtatgcctccacggaatgtcccttgctcatgacgaacttgtcacggtccgggtcgtcctggttctcaggatttatgttcatctggcagaagtacagctctgtcaggatctcaagcacgctcatgtcgccgccgatgtggccggcctttccttccacgatcatgtcgatcacggtctcccttaattcgtaagccaaagctttcagattttccatatttccgtcctttctatttccactgctatgtatcacaccgcctattttctcttaaacatgcgcaccattttttcacgcattacaggattttccttcatagcatcgatcacgacagctatgagaacgaccccgccggtaactaccgtctcccagtaagaagatacacgcagcagtgtaatggatgttgagatcgtaccacttaagagaccaccgatcacagtacccacaacgccgccgataccgccggtcatggaagttccgccaagtacggaagccgtaacagaaggcattacccagtttgcgccgatacttgcctggaaagaggccagcttacatgtcatgagcacaccggcggtagctgccagcagaccgctcagacaatagacgagcatctcaactctctctgtcttgatacctacgattttcgcgcagtttctgtttccgccaagcgcaaagatatgacggccgaatttcgtgcgtctgagcatgacggtcaggataacgcagatgatcagcatgatgatcacgatcgtcggaaggatccctccgatgactccattggcaataaactgcgcgtcatccggaacaccaacgataggcatacctcttgtaatgatatatacgattcctttgtagatctcaccggtcgccagcgttacgatgaacggagtgatcttcaagtatgcgataaagaatccgtttacagctccgaacacaacgccgagaagacaggaaataaggatcgcaaggtatgaattcattcccatctcgaccatgaatgtagcggcaaacatactgctgaccgagccgatcgccgcaacggaaaggtcgatgccgcctgtcagaagtacgatcgtctgcccaaaactgatgatgatgataaaggatgccgcacgtgtcagcgtactgatgttatatgctgtgaaaaagttgccggtggcggcgtgtaccgcaattcccacaagaattgtcactatgaggaccattcctgcagtagatttaaagaaatcaataatttttttacccattgttttattccctcctactgaaatgccactttcagaacgtcttcttctgtggtcatgtctacatcttcgatatatcctttgattcttccctggtgtacgaccattactctgtcggcgagcgccagaacttcctccatctcggaggagatcacaacgaccgcgactccgttgtccgccagttcccgcacaagctgatggatctctcccttggcgttgacatcaataccgcgggtcggctcatccataatgagcattttgattcctttggccatccagcgggcaacgatcaccttctgctggttgccgccgcttaagttcttgataagctgctcctgccctgctgttttgatcttgaatttgccgatatagtcgtcggcgatcctggacgcctctttaaaattgatcaggccgtttttcttcagctggtcataggaaggaagcatcatattttcaagcacagacatgccaggtgtgatcccgtcgtgacgccgttcttccgagacataccccatgccgagcctgatcgccacgcggggatctctgatgtctacttctctgccctccacaaatgtctttccgcccggttctttctgagttatgccaaatacagtcttaaatatctccgtcctgccggcgcctacgagccccgccacgcagagaatttctccctttttcacctggaagctcacatcctggaactctccttcccggttcagctccttcgcttcaaagaacacttcatcggagacttctctcgcaatatgccgggactgttccactttcttcccggccatacaggtgatgatatcttcttttgtcatatctttgacttccgccactttgacgagctgtccgtcacgcatgatggtcatgcggtctgcctgctcaagcacttcatcgagatggtgggtgatgaacaccattgccgttccctcttttttcagcctctgcatggattcaaacagggattcggcctctttgttcgtaagcacagccgtaggctcatccagaatgagcaccctcggcgagtaggcaagtgcccgggcaatagacacgagctgctggtatgcggcagacagtgtctttactttgcgggtcacatctatctcaacatttaagatcttcaataattcaattgcttctttctgtgtttctttccagttgatcaatgttcccttggctctctcgtttccaaggaaaatattttcttctatcgtagcctcaggaatgagattcagttcctgcggaaccaatacgatattctttccgaaggcatcttttggagatgagatcttgaccggactgccgtccatgaaaatctcgccttcatccatgatgtactgtccggtaaggacgttcatcaaagtactcttacctgcaccgttttctcccagcagtgcgtggatctcgcccggcttaatgcttaagtcgactttatccagcgcttttgtaccagggaaggtcttggtgattcctttcatttcaattacgaattcgctcaacttattcacttcctctacctttctttcaatccttcgtgccgccttttcgtgctacatttcttcttttttccaagcttggcccccacgcccttgcgggcggatgcgccgcccgtatcaagtcatatatattgaactgctaatgttcaatatgacatacttattgaactgctaacgttcaatatggcatgcttattgaactgttaatgttcaataagatataaaaattccacgcaaccatgctcacataatcgcgtggaattttataatcagccagccagtctgcacgtggtgtgaaacccaatgtttacttttagcttattttgcttcaccaaacagcatatcgatgtattcgtctgcctgatcctggtatacagatgttgatccaacgtctgtgatttcgtcaaccttttcaccgtcgatacattttactgcattgtagatcagtttgtatcccatgtcatagcagttctgaacccgagcaacatataaggtaccgtctttcaggtagttgaatgtacgaaggtcgtggtccataccgccgatgatcacttcgccgctcttgccggcatcttttacagcctgacatgcgccgaccgggttggacatgttgttgcagaggataccgttcagatccggataagcctgcatccatgcttctgtgatctcgatcgccttttctacaaagtcattgtctctctggtcgtcaactacttcgatgtccggatacttttcaactgtgtcgtagaaagcctcaaggcgctgctcgtgggaagatgctccgatcgtccctgacaggaaagcgatcttgccttttttgcccatcttttcgcacactgcttctgctattgcggcaccgtcgccgtagttgtcattgtttccaacgaaaaatgatctcttggaatccgggatatcagaagatgcaaacagtgcaactttaacacctgcgtctacagcgtcatcaacagccggctgtgttgtctcaatctggttaacatctaccgccacaaggtcatatccctgtcctactgcagtctcgatcgagttgacctggtcaactgcgtccggctcaactggtgcgtaccactcgtaatcgatcgtcacgcctttgtccttaaagtcttctacagctgcttttacaccgacttcgatcgcatcgtaccaggcatgtactaacttgtatgtacagtagatcttatattcatctttctttggctcgtagtttgtgtcaaaatcctggtctgcaagagctttcgcgtttgcagcttcctgtgtatcctctgttttcttgtcatctgacttggaatcagattttccgtcgtctttgcttccgcatcctgccatagccaaaaccatagctgcgactaataataaactaacaattttctttttcataattttctcctttcaaacttaacctttgctttttgcatgttgcaaagcctccttgaaattctcctcctttctcctaaatttttcagtcacgggaattcgttatttagtaaattttttataaattatcgactaaattattttttctaaatttatcgaacaattcataaatatttttagaaatgtagcacattgactaagttttaacggatttccctctgttttttgactttataaccaagttatatcacctttatcttgtcatgtcaactaaatttcaaataaaaaaatagtgtttttactaaattaattttagcaaaaacactactaaatttttaaatccctttatttacactaatttcttcacactttcattcacgattaattttgttccaagtttatattttacagtatgcttccttttgttgctcattttttccatcagcatctccacggccatctcgcccatctcatccccggacaactgtaccgttgtaaccttcgggtctgtgaaggaacagatcggccggttgtcaaacccgacaatagacacctggtccggcactttgatctcccgccgcttcatcgcctgcacagcccggcacgcaagcaggtcattgtcggcgagaaacgcggtcggaagctttgtatgtccgtccagataccttccgacatcgcgttctgtctccgattccatatatcccacttccatgatccgttccgtatcaaacgtaagccccctgcgccgaagacagtcctcgaacgcctgcattctctcctcaaagcagagaatcggcactttacttttgatatacccgaactctctgtgccccatctggtacagatactcaaacccctggtatatcccgagataattgtctacagtgacagtatctaccgccagcgtagggaacggattgtctatgaaaacacacgggacattgagctttgaaaagatctccatatcctcagggtacatttccactgcatacacgatataaccggcataccggaagttctctaaagcgagatacctctcattgagcggcatactcttgtccagatacatcatggtcatcgtataattattccgctcaatagccttgttgaggctctcggacaaataattaaaaaacgggtattcgtccacgatcgccccgccgcacttatatatgacaaagcctatatcccctcgtttgacgcccccgtccttcaggagatactcacagtccagctcaatgatcttcttcaggatctcttctcttttttcttccccgacccccggtttattgttaagcaccagagatacggtcgccggggatactcccagttcccgggcaatatccttcgctttatacttcatgttacttattcctcccagattttcctcgaccttacacatttttatccggcaatttattcacctttaaattttctgaaacctcctgtaatctggcaaacgaattggcctccatcttctgcagcacgcccatatatacggcgtccagcatggcctgttccgctaccctgcgggcaatgatctccttgtctaccgtcgtgtcagtcgtcacattgtataaaacaatatccgaatacttcgtaagctccgacttccccgctttggtgatacagatcgtgaccgcgccgcggctttttgcgatccgcatggcttccaccacctgttttgtcctcccgctgtgagagatggcgatcgccacatctccttctttcatgttgcaggcattcacgatctgcacatccgcgtcgctgtctgcatagcagtcatatccgatcctccggaaccgaaggcttgcatagctgcacggaaacatggcgtcaccgatggcaaagaagcatattttattggccgtggacaatacttcacatgcattttcatactcctctaccgcagccacctccagcgtcctgcgaagattcagtatgttaagctcaaacactcttgccacgatctcacccattccctgcccggtgctcagacggacagactcctccttcaccgccggcagctgaagctgtgtttccagcagacttttgagctcggcatatcctgatacaccgatcgttttgcacagtcttacgatcgtagcctccccgcactcgcatcttaccgcgagctttttaagagacatcctggtaacttccttcggcgacgccaggacaaactccgccactctcttttccgccgccgtcaggctaggcagaaggaacctcgtcgtcgccagaatattacgtccattctcaatcatacccatttacattttctcccattctgtcatcttagctttattatcccatagttttactccgctttcaacacgttatttttggagtgtattaattgttattttccattattttgtctattatatacatatattttcccgtttatttttatattaattgtgcattattcagtatttacaatccaattattgtattctataattggagcatgaactaaattttacaaaataatttttagaaaggactatatttatgaaaaaatcatttcgagccacgctcattgacactgtcctgcaaagcgccaatgactatgacaacctggtcgtcctgaacgccgattctgcacgcgctctgaaactgaccgattttacagccgcatatcccgaccgcatgtatggaatgggcataagcgaagcagatatggtcggaacagcagcgggcatggcagccgcagggctgcttcctgtgatcgtcggattttccatgtttgtatccgaaaaaccatttgaacagttacggcaggccgtcgcatacccgaatctgaacgtcaaggtcatcgccactcacagcggcctctgcgtggggcaggatggagcgacccaccaggcgctggaggacatggctctcatgcgctcgctgccaaactttaaggtatatgcggccgctgatgtggccgagacaaaggcggccgtcgaagctatgctgaagcatgacggacctgcttatctcagactcggccgtgatctggctgaagacatttttgatgaaaataagtccttttatcccggaggcgccgacgtactgcgggaaggcacggacgtgacgatagcggcatgcggcctcatggtggagcaggcgctgctggcagcctctgcgcttcgctgtgaaggcatcaatgcgaccgtgctgaatacatattccgtcaagccgctcccggaagctctccttttggagcgggccagaaagacaaaagcttttgtcaccgcagaagaccactccgtcataggaggtctcggcggcgcggtgtgtgaattcctgtcgcagacatgtcctgtgccggtgatccgcgtcggcgtaaaagactgcttcggggaatcaggaacacaggacgaattatatcataagtacggcctgaccgcagaccatatcgtcgacgcggccagacgcgcggtcagcatgaaagggtaggtggttacaatgtccagagatataaaagaactgaaaacaaaagcaaatatgatccgcagagatattttagagatgatctataatatccgctccggacatctcggcggctctttctccatggtggaactgctgacggcgctctactttgacgaaatgcactacgacccgaagaacccgaaagctccggagcgggaccgctttgttctctccaaaggccacaccgctcccgccctctacgccgccctcgccaatgcgggattctttccaaaagaaaagcttctcacttctttccggaggatcgactgcatgctgcagggacatcccgacatgaaaaaaacgcccggagtggagatgaccagcggttccctcggtatcggcctctccgccgcaggcggcatggcgctcgcctgccgtctgcgcgggcttaaaagccgcgtatactgcatgatcggagacggggagctgaacgaaggccagatctgggaggccgcggccacggcagctcactactgtctggataaccttacggcgctcatcgatgtcaacggactgcagaatgacgcggagacaaaaaaggtgaaaaacatgctcgatatccgaaagaagtgggaggcctttggatggaacacgatcgagatagacgggcacgactttgacgccatcttcagcgcacttgacgcagcccgtgcatgcaagggacgccccactgccgtcatcgctcacaccgtcaaaggaaaaggcgtatcctttatggaaaatgtcgtcgccttccacggcaaaacgccgacggaggatgagtaccgggacggaatgaaggaactgaaagcagcaggcttgtaacaggaggggacagcatgcacgaacaaatatttatcggatgtgatatcggcacatcaagtacaaaagcagttgccgcagatataaacggcaggatccttgcccatgcctctgtgtcttacgggctgtcaaagccgcacagcagctgggcggagcagcatcccgacgtatggcttgacgctgcggtatccgcgatccgttccgtcacagggatgctttctgcgtcggaccgcatcgaggcggtctgcatcagcgcgctgtacggagggaccggcgcgatgtgcgacgaacatatgaagcccgtacggccttccatcatctggatggaccgcagggcagaaaaagaaagcagggagcttaaggagacgatcggggaggaaaacatatttcaggtatccggcaatggaacagactcttacttcgggtatacaaagcttctctgggtcaaggaaaatgaaccttccaaatggtcgagaatacggcacattctccccatccacagctacgtcatctgtaaaatgaccggcgagataactgtcgactactgctccgccggaaacgtggggggcatctacgattacgcagaacattcctggtccgaagagatgtgccggaccatggagattccttttcatgcgctgccctcccgcttttaccggccggatgacatcgtcggaacattgaacgaagagtaccaggaaaagcttgggatccacaggccggtccccttctgcgcaggcacggtagactgtattgcctccatgctgagcgccggcatcgtacatgccggagataacgcggccgtactcggcacttctttgaactggggatttatacacggcaaacgccccgataacccaagtcttatctccatgccttactgcacagatcccttgtccgtcagttatacctacggcggggcttccaccgcgggcgcccttccgagatggtttgcccagaactttctcggtgaagattctgcctctgcctacgactgcctggagcaggagatccgcggcaaagccataggccccggggcggacgggctcatcgcgcttccttacttcatgggcgaacggacgcccatctgggatgagaatgccgcgggggtgctgttcggcctgacgctctcgcacacgagggcacatatctaccgggcggtcctggaatctgtggcctattcactgagacacattatggagtccatgacagacacgtcgtccggcgtgagcaaaatcgtgctcgtcgggggcggggcccgctccggactgtggaaagagatctttgccgacgtcaccgggcttcccgtgtgcacaccggtacaggacgttgaggctcccctcggggacgcatttctcgccgccgcgggcactggctgtataagcggttacagcaccataaaagactggaccgccatgcgcgaacccgtgctgcccgtaccgggccgccacaaacagtacagccggtactttgcactatacaaggaactgtacgaagacctgaaagagacaatgaaaaaacgcgcggatatgcttcggaactgaagcacaccgtgccaaatatcaactatccgtccgttaggaacaagcagaaaggagcgcactattatgaaaatagatttcagcaaagttgtagaactgagccaccgcatgattccaagagaggaaccttttaatctccagacgtgggtatacgatgtggatattttaggggagagaggggagccgcacagtccgggtacatggtacgtatccggcgacgtaagcttctccacacactgcggcactcacgtagaatttcccctgcatcacgtggaaggcggtttaaacgccgccaccttccctctcacaagcctgataggcgaagccgccgttcttgattttaccggcaaaaaggcaggggactgcatgtcactcgacgaattcaaggcatatgaagacaagatccaggaaggggatatcgtcttccttcacacagggcttgacaagaactggcgcactgacgactgggagccttatccatacgtggcatgcgacgccatggaatggctcatccacgagaaaaagataaaagccatcgggacagacgccacttctctggagaactttaatgtcccggaccagccaaaccataaccttgctttcaaaaataacctcgcaatggtggaatcactcacaaatctggacaaaatagcggacgaacgcgcactcatatttatgctgccgcttaaaatcgtcggaatcgaagcatgcccgtgccggatcatcgccgtcaaagaaggcgggatttactaatacgcagttggggacgggggaaatttaaatttcccccgtccccaacttatttcattttaccaaaattggttctatatgattttgaacaaaatccacacggtcaaaaatagtcggtttgaaatacgaggtcactgctataacaatgttgttggatgtattcacatagatcacgttgccactgtttcctattgctgaataacagttgtttttatcatctgtcagccaccacaaatatccataggacatatttctaaattcttcaccgcatttgtgataaggctttgtcatttcttcaatccattttgatgacacgatttgttttccgttacagttccctttatctaagcagagctgcccgattttggccgcgtccgcggcggacaggcacagcccatatccggcagcgcccgtaccctgcgggtcgcaaaaccaaatgtggtctttaggagtttttgatatggtaaattccttatgttcttcagccgtttcagccagatagttttcatgtactttaacaccggccggctcaaagagatattgattggcaaaatccaccgttttcatgccgcttactttagcaataatacccgttaaaatatgaatccctaatgtagcgtatttaaactctcctgtcactccggctctgccaccaagaaaatctaacgccgaaatagtccaatcttcactggaacagatttttgtccatggctcatatttatatttgtagggtgctgtcattgtaagtaaatgccttatagtgacattttgaattgttttttcaccccgttttattctgtattccgggaaaaaagacaaaacaggctggtttacatcttctatcagtttttggtcaacagcgatgccggccagcaaagatacgatactttttgttacggatgcaacgtggcaggtatcgtcttttttgtagtcattccattcgtctgagtagacttcggctccatctttatatgctgctatctggcagatattaggctgctgctctgcgatcaagctatgtaattcttctatattcaaaatgtatatcctcactttcaaatttaacctatttccgtagacctgcgttgatctgagacaaaaatccctttgcactctggcgtatcatttcgtacacctcctgttttgtaaccgttatcaatccagctgctataaaagaagccagcccatgagtatatatcatcatatttctgcagaatatttctacttcctctatgttaatatcaagttgctgcgcgatctgagccttcactatattgccttcggtcgtatcagtaattgcgtcaaagcctcctatgaagactttttcattattgttcatgtagagatattggaataacctgggttcatcaaaggcaatgtcaatatacgcggtaccagcctcataaaaggcagccattccacttgatgaagtggtttgcttttctttggcgtactgcaatgcgtattccagaagcgccctgcgcagtccgtccatatttccgaaatgccaggatataggctgtgtagagcacccgatctcttttgccagcgctttaatatttagcgcgcaataaccttctcgtatgagcatttgcagcgcgtgctgtaaaattgtttcctttggaattttgggactgcttggcataatacaacctcggttctataaatcaatttactgtaaactaatttatagtatatgtaagaactgcctgtttgtcaagaagaggatatcccaaaatctttttttgatttcagaatatcctcttaccttacaataatggaatcgttatccgttcaatatctctttgatcccgtctgccattgcctccagaatgatgcagcacgatgtggctcctgcatccagcacgccgcgggagcgttcgccaagacggctggagcggccatattttgccgtcatgtcctttgtggaatcgcgccctgcccgggctgcttctttcatcttatccagtgttccggcaaagtcctccccggcttttgccccgtctccgacggctttggccgcgggtgagagggtgtcgaccagtgttttgtcccccactttggcttcgacgatgccgcacagaccgtcaagtcctgccgcgagcatgccgccgaaggcttccagacttatctcctcaagctctgcccctgcctcggccatatccataaatatcgttccatagatgggacccatggagccgccgatctcatttaacagaatcatcccaagctcatcaagcccatcggtaaaactgatatcttcatccttgaaccttgtctcaaacacagtgaatcctttattcatgttcattccgtggtctccgtccccgatcagtccgtccacctctccgagatatgccttgttatcctgtatttcctttaccatcctaagcagtaccggcttgccgtccgcatttttaaatccgcccatatgttcctccctgccattctatatttatctcaaaactgtgtaagccccatactctcagccggcatgtctatcagctcttttaattccccgtccagcttcatgaccgtgagcgttgctcccatcatctcaagggacgtaaagtaattgcccacatatgcccggtgagtcctgatacctttgctctccagaatcttgtcgatctcatcgtataatacatacagctccatcaccggagttgcgccaagtcccgagacgagcacggccacttcatcccccttctcaaacggataatccggcagcactacgtccgtcatccgcttagccatctgagcagcgctctccagcgggcacacttcaatgccaggctcaccgtgatgcccgatgcctacttccatcgttccgtctttgatctcaaagttcgggtgtcccaccgccgggagcgtacacggcgtcagcccgatcccgacgcttctcgtattgtctatcgccttctgggcagccgccaccacttcatccagactggcccccttcgccgcttttgctccgcccaccttccacatgagcacctcgcctgccacgcctcttcttttttccctctgatccttcggggcggacgccacgtcatcattagcaaccactgtctttacggttatgccggccttcttcgccatcttcaccgccatttttacattcatattgtcaccggaataattgccgtacaggcaggcaactccccgcccctggtccgcctccctgcacgcatccaaaaatgccgccgccgtcggagaagaacatatctcccccaccgccgccgcgtcacagagattcctgcccacgtatccgataaaggcaggcttgtgtcccgaacctccgcccgtgacaactccgactttgcccgccggaatattcttcgccttcacgacacgcggattttgggccgcctccacaatatcagaatgtgctttcagaaagcctttgagcatctcatctactatatcatccggatcatttaatattctctgcatacactgtttcctccaacttgttgttctgtctatttgatcgtatatccgccgtcgatcagcaggttatgccccgtgatcatcgcagccgcgccgctgcacaggaagccgatcgcgcccgcgacctcatccggttccgcgaaccgttcggaaggcatctcctttttgaacgcatccccggccggtccgtcccacgccttatgtccaagctctgtcagcacgaccgtcggagataccgcattgacgcgtatcccgtatctgccccattcataagccatcacttttgtcatcgctatgaccgcccctttggaagcacagtaggccacatgcttgtcaagagcgaccacacctgcctgagaggccatattcacaatacatccgtttatttcattatcgataaaatattttcccatcatctgcgccatcataaaggatgccttcagatttacattcatcgtgcggtcccagtccgcctcgcttataagttccgctttctcaagcgccacgatccctgcgcagttcacgagaatgtcaacctggccaaacgcctccgccgccgcgtcaagcactctctgcctgtaggccgcgtctgtcgcatcccctgagactccgatggcttttggatccagttcctttgcaatgttgtcaacgtccggattcaaatctgccaaacatatattcacacctttttcagcgaaaaaccgggccgtagcataaccgatacccgctgcacctcccgtaatgaccgccgtctttccttccagcgaaaagtccgcgtctgctccgtaatattttaacatgatttttcctcctcactttcgtatgccgggaagcatcatcaggcttcccggcacatttatactattgggctctctctctgaaatccgctacattgtctttgtttacctcttcaaactcgatccagtaattctcatcaacgtctttgccgtttaccgcgtccataagaacctgtactgcttttctcgcctgtccgtccgcgttctggaaaatagatacgaccaggttgccgtcttccaccgcgtcaagcgcgtccgtgatcccgtccacgcccacggcggggatatccttattggcagccttcactgcctctcttgcgccgagtgccatctcatcgttctcgccgatgatgccgtcgatctcatcaaacgcctgcagccatgtctccataacagtcatcgcctctgaacgtgaccagttggccgtcttttctgccagcacttccacgcccgggttcttgtcaagaatgttctgtatgccctcacgccgctcgatctgcgcagactgtcccatcggtccctcgatgataacgatcttggcgtccgttcccactttatccagaagggcctgtgtctccatctctccggccttcacatcttcagaccctacataactcgtcagtttatcgttcttcacacgcgtattgacaccgacgatcggtatcccggcttccactgccttgtcgacacacggagaacacgcttccgcgtcctgcgggttcaggatgataccgtcgcatccgtcggcgatcatcgtctccacctggctgatctgcgtgcttgcgtcatagtttccgtcatagaccgtaagctcgatgccaagcttctccgcctcgtcctcagcagcattggcaagacgcaccgtatactcatttttcagactgtagagcgtcatcccgatcttcacctttttcccggaatcctctgtgtccgacttttccttctttgcatccttgtccgccgctccgcagcccacagcgagccctgccgccagactcaggcacaacagtacacttaataacttccttttcatttcttttcctcctttttttgtttatataaaaatgcagctgcatctttattttctttttatagcggcacctaccttgattcgttgagcgaatcgagcatgaccgcgccgatgatgatgattccctttataacgagctgccagtacgaagacaccgccatcatgtccagtccgttgttcatcactcccatgatcagaaaacctacgactgttccccacagccgtccccgtccgccggacaggctgttgccgccgatgaccgccgccgcgatggcatccacttcatacccgtcgccgttctgggagatcccggaagtgacgcgggacgtcagtatcactcccgccagaccggcgagaagacctgatatcatgtacaccgagcatatgaccatttttatattgataccggacaccctcgccgacgttgcatttcctcctgtggcaaacacgtaccgtccgtatcgcgtcttataaagtatgatataacatacaatcaatacaccaatcaatattaaaactggaattggtataattcctgcacttccgccgccgatcacaagaaattccttgctcagtcccggaattggtttggcgtcactggccatgaatgtgatccccctggctatgctcagcataccgagcgtcgcaataaatgccggaactctcagatacgcgatgacaactccgtttatcgttccgatgagaagtccgatggcaaggccggtaagaagcgccacgtaccacggcattccggtctccgttctggccacaagcgcacagtacatgcctgccgcccccactgccgagccgacagacaggtcgatccccccggtgaggacgacaaaggtcatcccgagcgccagcagaccgttgatggacgcctggcgcagcatattgagcatatttgtgactgtgaggaacctggctttcattacggtaaaaaatatcatgatgacgaccagaccgagaatgacgccgtactttgccagaaattctttgatgttaaattgtttgcttttactcttttccataattttctcttcctcccttatatgtgcgataccgccatctgcatgatgctctcctgcgcaaactcactcctgttaagctctccgcccactttcccgttgctcaggacaagcattctgtccgccattcccatgacttccggcatctccgaagaaatcatgataatagcgtttcctctcgccgcatattcgcacataagcttatatatctccgactttgcgcctacgtcgattcctctcgtaggctcatctaaaatgagaagcttcggatttttgatcatccacttcgagaggacgactttctgctgattccctccggacagagattttacaagctgcctcgggctgtgcagcctgatacggagccgctcgatctcatcctttacgagactgttttcttccctttcattgatgaacagtccccggctcagttccttcatagacgcaagcgagatattctgtcctacgctcatctcaagtacaagtccttcctgttttctgtcctccgtcacatatgcgatcccctcccggatcgcatctttaggctttctgatattcaacggctttccgtcaaagatgatctcacctttgtccggtctgtccaggccgaacagcgcatgcataagctctgtcctgcccgctcccaccagacccgcgattccgtatatctctcccctcttcaccttaaagctgatgtcctggaatttattcccgagcgtaaagttcctgacttccagtatcgtatccgatatcgggacctccgactttggaaatatctccgtaagctcacgccctaccatatttttgatcagtatattattgtcgatctcctcagccttccacgtatttacatactggccgtccctaagtacggtgatatcatctgatatctggaagatctcgtccatcttgtgtgagatatagatgattcctttcccctggtccttcaggtcacggattatggaaaacagattatcgacttccttgtccgtgatggcggaagtcggctcatccattatgatgatctccgcattcaaagatatcgccttcgcgatctctacaagctgctggtccgcgacttttaaggaacccaccttttctttcgggcttatatgtactttcaggctttccagcagttcctccgtctgcctgtacatggcggcataatcgacaaacagccggccgcccggttccctgccaagataaatattttccgccactgtcatctccggcaccggggacagctcctgatgtatcatggctatgccgagcgcctgtgagtgctttggcgactggatatcaacactctttcctttgaccgtgaccgttcccgcgtcacatttatggattccggccaaaaccttcatcagcgtggatttgcccgcgccattttcccccatcagcgcgtggaccgtaccttttctcaggatcagatctactccgtgcagcactttgaccgtgttaaagctcttttcgattcccttcatttccaataaattcaaagtcctcgctcctttctcactgaattcctctgtctgtttttattctattacagtgaacactcccggcgaggttcaatattttacaataaagttttaattttccggatgtttttttgctgctcatatttatttataaaacaaagatgagaacgcagcttctgcatgtatatggtatactgttaactataagaagataaaggagggctgtatacttatgcttaaccctatacaccgcgctgcttagcaaaggctgacgcagctgcccggtatccatttattgtgagttagcctttgcttttcctgttaatacgaaacaaaggagagcaagatgcgctacaagaaagctgaccagattctgccgcaggagttacttgaaaagatacaggagtatgtggacggcacgatcctgtacatcccaaagaccgaggaacataaaaagaactggggagaaggaacggcgacacgggaagaattgaggatccgcaacagccggatctattcagactacctggccggtgaaaatatggacaatttatccgccaaatatttcctgtctctgaaaagtatccagcggatcatcggacaagagaagaaaaaaaacgaaaaaggcctgaaccggtgacacatcccggttcaggtcttttctcaagtttgtttataaaaaatgtattcggttggacggtcctgcctgtagtgctacaattttacagaacgaaaggactgtgtaaattgaaaaagatcgtatggaacgtccgatgcggaccgcctgccgtacttcgccactgccggggctgcggctttaaaactgaatatatatgctccggccggttccggatcaacgcgcagcggaagcatctggacatttggctcatatacagatgttcccgctgcggcgcaacgtggaatctgcccatatactcccgcgtccgccctgcctccgtagccccggatcttctcgggcgttaccacagcaacgactccggccttgccctgcggcatgcgctcgatatgggcctgctccgggcgaacggcgcggctgtgcgcacccccgtcttaacgatagacggggaggaccttcctcctgacgagtccgccgaactgcacctggcctgcccgtacccgctgaacgtaactgtctcctccatactgcggcaaaagctctccctgtcccgcagaaggctggaacagctcattgaaaacggcacactaaagggaacttcaggcgcagatctgatgagacagaagctgtccggcacagtcatcgtgaccgtaaacggatctgtcaccggcttatgagcttttccctgtatcctctcggcgtctctcccgtcaccttcttgaacacgactgaaaagtatttcggattgttatagccgcacagttcgcctatctcctggatgggaatgctggaatcctccagcagcttcctggcgatcttgatcctctcgccggtgagatacgcgctgaatcctccgctcgtgtatttcttaaaaagcgtactcacatagccggatgtcctgtggaacttttccgcgactgtattcagatccagttcctctgttatgtgctcatccacaaagtccagcatctggcgcatcagcgcctcattcactccgccgctgtcgtcatagagctccttgagcagttcgatgcgctctttcagctcctgccccgcctccccaacggaccagatgcaggagaagctcttgtacttctcatcccacaccggtttcccggtctgcttgcgcgacatgaccagattgatatggttctgcacctcctcatactcgtgctccagaaccttcagcacacggcgggtcttcccggaatatgccagcttccggtaacggtccagcatgtcaaatatattgatctcttcgatcggcttcagccgcttcacaagctccggagcctctgtctcttttcctttctccagttcctgataaacgcagaccatatctccttcttcaaatatcttatagccggccgccagcatggcatgccgaagagagacatggagctgcacagagtcaaaagccacatccccgatccccgcgtagatatctgtcttacaatactgtttcagcagcgtcaccgcgtcccgcacaagctttttcttctgttccagcaaggcgttctggctctctccctcaaagatcgccacaaccatgccgggactgtacacaacattgaccaccttctcgtcgtccaggcggagcccccagaactcatccagaatattcttcaccacaaagtctatgtattcctgattccccggcgtcaccttatactgaaccgcgacgcacatatacaggtgggagtcaaagctcattccaagctctttaagctgaataagataattcctcgcctcctcgctgcttgtacatttcagcagaccgagcagaaagtctctcttgagcttttccataatccttatgttctcgctccttttcagatattcctcccggttcctctgctgcgcctgccggatgtcagctatgtatgaatggatgagttccacgaattcatttttcttgatcggcttcatgacatactcttttactccgagcttgatcgcctttttggcatattcaaaattttcatatcccgagaggatgatgaccggcacatttacattgatctccttcagcctctggataaattccaggccgtcgcagccgggcatgcttatatccgttatgatcagtcccggcgtctcggtcctcgacttttcaagcgcctcaaggccgttgcgcgcctccacgaagatcacctcttcccgcaggttcccggacaatatggagacgatccctttccgtatgaatttttcatcatctgcaaccagtatcttaaacattcccatcacctacagtacaattatgatccggatcaccgttccctcgcccggcgtactttcaatcgctacttcgctgccttccctgcatatcatctcgattctctgttttacattcagaatgccgatagatttgcgctgcttctgtgagcaccgtatctctttattctcatcgagacatttctgtatccacgcaaccttttctttctctatgccgcagccgttgtcctgtatggcgatcacaaggctgccttcctctctgcgcgcggacactctgaccttccacggcggcatctttgtcttaaatgcatggctgaaacagttctccacaagcggctggagtatcatctttggaacgatcacgtcctccagtccgtaatcacattccagctcatcctccaggtcatcttcatatctcatgcgcataatatagagataatttttcaggttctgccattccagttcaaacgcaacttcattgtttccccacttgatgctgtagcggaacagctccccgaggacagccaggctgtttcccatcatataataaccgtctatctcgcactgcatacgcatattttccagcgtattgtacagaaaatgcgggttgatctgggcctgcagcgcttttatctccgcatccttctgggcctgttcattgcggaccttctcttccagcacctcattcagatgggccaccatgagattaaaggagctgccgatgcgggatatctcatctgatttgccgtattccggaatgagcacatcaaaatgtccttctcttaccttgcccatcatgacgtcaacaacaacaaggcggttcagcatattgctgatgacaagatatgtgatgatccccatcaccccgagacacataacggtaatgagcagcacgcctgtgaccatgttaaagatgttgctgtaaatgtcgtctcttgagagaagcgcgatattgatcagccctgtgttcgggcatacggaataagacatcctgtagctggcgccgtctatgtacagctcttccgtgcccctgtcctcctttatacgttccataacacgtttttcaaggcttttgtctctttcccctgtattgatcagaatatttttccgcctgtccgccacgatcttcgtgattccggaatcgtcattgcgcaggctcgtcacttccataagcctgttgatatccacatccgtctccacaacacctatcacatccttcgtccctatggcatagacctttttgtaaatgggaagaacgtacacattggcattgcctactttgatgtggttagtgtccagagtggagaagacaagttccgactccctgacagccccgtatacagccccctgggtatccaccgtcacctcggcgtaataaggcttctcctccagagtcttaaggggaaactgccagtccgccttcacctgcctattcagagaatacagtccgatgttgccgaaaatatttgaatacaggtaacggttattgataagctccttctgtacacttgaagtataatagttgatctcacgctggctcagttcgttcttgtcgttcataaaataggaaaactcctgccggtagaacagctcgtccagcatgacgtcggcatctgacagtgtctcatctatcctgccctgcatactgccaagcacagaggcaagtttcccgtccgccgtctccatggaggtcttctgatacatctgtatatatatgatgcatatgataaatatcggaacgagaagcaaaagcatcgtcgctatcgtcatcttccataccatgcttaacccataacgtttcttcattccttcacccctcttcggctttctccatctttttccagtataacacacccgcaggagagataacagagccgcgggacagagtatgggtgtttctgtgattcacaggctgctttctttttcaatattataatatggaatggaggtattaatatgtcaactacaaaatcaccctgcccttaccaaggtcccggaaagcaaaatccggcgaacattggaggttatgatataattcgtcccacagaagattccgctgacccggattattggatcacatccggaaatacaaccgtctatgacgccggctacgacaccggccagggcggcctcatccattttcaggaccgcctcaggatatccaaaggagccgcaggggaatgtaccgcggcagttacactggaggtggaggcagctcctctcgtattttcctattatccgccgcactcgctggacgtcgtatttgtactggatgtaacagcaagcatgatggcgggcggaagccgcaaaatggctctcgccaaaagggcattgagccagacgatccaacttctctggcggcagaataaagagacccgggtcaccattgtaccctttgccagagatgcgtatgtcccgcttccggggggcgggctttcctacgattacctcggcactctgttcacatggcggcgatctactacaagcggcaaccgcatcggtcagatactcggctaccgcaacggctcttatgtatcaacgacggacattccggactatatgacgcagtctgcgcctatagcggccagcgccgggttaagtctttacaactactacaattattataaaatacaatactctgatattttcgaggacgacggcgccgcgcgtacagatgccgtgctggaccgctatctgtcggagatctatacgcaggatccgggagcatacgcaggcagctttatacagaacgtggcctccggcaccccgctggacagcacgcagctgccatacagcatgaatgataccggctatgaaaacaatacgattctggacaatttgatctgggctatcccttacggggaagacacaaacacagaggcagggctcaacgaagcctatacactcttcaacacgcccggttttgcccagtcagacgacattctgcgccgggcggtgattttgatcacggacggccaggccaaccgctccgtcaatccggcttatcccggtgtatacgcggcgcccggcagtacggacagtgactttttccccagtgtacccggggaaccatggcgctactttatgtacctgcagcaaactgtaaacagccttattgccgagactgccggccgctctgccacgtcagaagaactcgtcctggccttaagacgtgcatgggagaccgcggaaaaaataaaagatcctgccggcggcaacgctactgtcttcgtgctcggcatagagatcgacgcccagacgcccggcccatacacacgggatgatgtactcaacatcatgcgtacgatcgcatccaccggctcctatctccacgaagccgctgaaaacggttccgacaatcctatcatcgaagaactggaacgtctggccggatatctgctcgtattgaccggcgggccggaagcggtcatcacagacacgatcaacactgcgctctttgagtatgtccctggctcgatccgcattaccggcgtacaggataaaataacattaaagtcaaaaaacgcatcggatattaccgacccgaatgaccctgactacaccgtatacaccaaacctgcactgcttccggatatcagtgatgccaatgtgcaaaacggggtcgtcactgtaagtcttgggacgattccgtatgctccggcatcacccgacagccgcacactgatccggctcacctacgaaatcaagaacaaagggccggcccatggctctcacctgcacacaaacaacgatcaggagactctgatcacatttcgggagccaaatcatcttgacgcggcctccgctgtgctcacgtatgacaatccgccccggatccttcattttcatacccctgtagtttcctgccactcagactttaccgtggagaagtatacaggtaccgaggcagataacacgatctacaagtcactgtccgtaccggcctgcagcgatgtctactaccgtgttgctgtccataatcatacgaacacatccctgcgctttccgcttctgtacgaagtgcagaatgtcaatactcttaaggaggctcaggcaagtcccagccgccgcctgctggcagaagattttaccgttgcggcgggaggcagccgggaatttacgttccagtacaaaacagactgcagtgacagcgttatcccggattttgccgtactggaaacagacaccggccctctttatgacaatgccgttatcgaggtgcagggagggacgtcatactacacggtacagtaccttaaccgctgcaccggaatgcgcatctgcccggatgagctcgtgacaggcgcagatgcctgtaagccggtggacgcctgcagccatatacgctgtcttccctgctggaaatttgtcagcgcctgtccgtacaggctggagccatgcagcggagaaaatataataaaactttactatattcccagatagacagaaaaaaccgcgatctccaaaagggatcgcggtttttgactctgccggccaaaacgcggccgtgatctgcagcagtatatgtcctccccgttctgcccggggggatcatttccataatgcggttccgtcatacacgccggccgcggcctcataatatcccagcctcctgcactcctcgatcacgagacggtagatcttgtcaaacaggcgggcagccttttcagggaacttcccgcggtctccttctgaaagtgtctcgatcacttcgatacactgctcatgaatctcgcagttcacagccgttttttccgtattcagcagtcctggtatactgcggccgatccggaagtttttctccagaagcatatagatggcgttgaatgcgtcgatctctatatgtctcgttatgacatccagaagaacggccggcgtgcgttcatacagatattcctcattccacaggcgctctatttcttcctttaccgtctgcagctctgaccgggtaatactgccggccgcacaggcagcggcgccttctgcggtcagcgccagcaactccagtgtgtccagataacgccggacatggtaagcgatcaaatgaggcggcacatgaacttttccgatatcgatccggtccatctccacgaagatcccattgccgcggaccgtcttcacaacaccccactcctgcaggatctgtaccgccttcagcgttgtgtcaacactgacgccgtatatattctgaagctctttatgtggcggaagcctgtctccccgcttataacggccggctgatatcagtccgatgatatccatgtacactgcagaatacctcacatcagccccctgcagcagtctttcaagctgttttctgccaagaaggacggctgagtccgcagcaacctcaaatgcggggctgtctccatctgccagtccgtacaatccggacatgtcgtcaaaacggacgctctccggatcgccccctgcttcaagggttttcatgaattccttaagctgcgtataatatcttgccctgattttaccgtcatcgtgcagcggtcttaagtcagacagcccaagaccgtctaccgcctgtaagatcagtgcattctcgtttcgtaaaacaaaaaaccttataaagcgtttggacattttccaaaactcggacgcattatcaatatccatattttccagaattttgcgcggaatttccaggtctttctttccgcaaagagaaattccgtttttgatcaccggataacagagcagtatccccgtcttcagcacatcatttgtgatctcagtatcgatcctctgcaaagctttcgctgtcgcggtatgtcccgcgcttgtgcgggccgctacaaccggccgcttcctcttagatgtttcaatatatcctttttcctccagcatggccagcgcacgacgtacggttttttctgaggttccaaattccagacacaggtcagcccgggaagaaagacttgtacccggcggcagcagtccgctttctattttattttttatgatacggaaaactctctcatacatcaacatatcgtattccaaattagctctgccttctttcatcctgtttcttcttgtccgtctacggacgctcggactgccccgttcttttttcccgctctgccagtgaatccgtgtaagcttttgtaatatcgttcatgacaaaaggtttggcgatatgcgcattcataccgctgtccagacacttttgaacatcctcacggaaagaatttgccgtcatcgcaatgataatgatatcctgcgcgtccgcgcggggaagcgcgcggatagcccgagttgcgctgtagccgtccataaccggcatctgaatatccatgaggatcagatcaaagaacccctccggcgcctctgaaaaccgctcaaccgcctcccggccgttttgggccgtggtgacggccgctcccgcctctgtgagcagggagaccgctatatacagattgatttcattatcctctgctgccagaatctgtacattgtccagcatggtctgctgttgtgtatcggcgttatttatgttttgtcctgtcagtctggccatgagtccggctatgtccgaatgaaatacaggccggcacagagttgcgtcggcgccgcacaatgaggccgcgtcgtccagttcatcctggtccctccccgtcataacgactttaagacggtcatttcgggctgcctggcggatatttgatatcaaagccggcatatcctcagaaaaatcccactttacaaaacaaaattcatacggactgccatgttccgctgccgcctgtatcctgtccaaaacggtctctgcatcggttgtcgaatcaacctgaaactgctctttttccagcacgacggcaagatgagtctccagttccacgatctgatttatgatcaggaccggctgcccgtccccgcaaggttccacgatctcactctcgttttccggctcataggaaaagggcagatcgactgtaaatacgcttccggcgccgatctcgctcgagacagtgacagaacctcccatcatctgcacaaagttcttcgtgatcggcagcccgagtccggttccgccgtattccctgacaattccgctgttttcctgtgtaaacgcttcaaaaacacgctccagattctccggtgcgatcccgcgtccggtatctctgacctcaaaccgaagccatatcccgttctcatcacgctgcagttcctctacattcagactaacatatccgtgcgcaggtgtaaacttcaaagcattggaaagcaggttggtcaggatctgattcagacggagcgcatcgccggtcagatactcttccagctcaccgtataagaaaatctggaaatcgatctgcttgttttttgcctgtacgaggaacactgtcgtcaaagtccgcaaaagccgtcccagatcaaacctttcagggtgcagctcgatcttaccgctctcgatcttggacatatccaaaatgtcgttgatcagagagagaaggtgggcggaggagagcgtgatcttgtcgaggcagttgcgcatcctgtccggctcttctatatgatgcttccccagctcgaccatgcccatgatgccgttgagaggggtgcggatctcatgagacatctgagacaggaaatcactttttgcccggtttgcggtctccgcccgttctttttccgtgcgaagcagctcactgctgcgtttttcactgcgccttaacagtaaaaagaatgtgaggactgttgcaagaatgatgaaaaagattcctacgcctactatcacgataaagcggctcaaatatacgatctgatcgtttaccgtctcgtatgccatacttgtgaccatataccagtctgtcccatgaacgggcacataataaagatactcatggtggtctccaacggacaaaagtgttattccgctttctcccgcttcaattgcagaacgaaaggacttcagatcataaccctcgtcaaactccgcctgctgttcgtagatagaaaacagattggatccgtacaaaactgtctctgaaaagatgcttttaatgacaaagtctccgtttttcgtcacaatattagagtgggagttcgtctgtttctcgccgtcgagaccgagcctcgaacctatgtcggaagtctgaatcccaatgatcacggcaacaagcttcccgtccttaaatggtgcgggagacatggaagtccccaacagaatcgtatcgctttcccagatcgtttcattgacagagagcagctccccggagccctccagtaaccggtccagatcagagatcttggacatggccggaatcgtaccgtcgggagaataggcgatccccttgtcgctgatggccgcgatatgcatgaaaccgttattttcctgcgcctgcgccagaaaatgtttcagactctcttcatccttcaggtcgttctccgatactgcgccggcgatggtacggatctgggagaactggctgtccagattcgtctggaaatgactgctgacttgtgccgtcatctcctgcaggtacactttgcttatgtttgtcactgtccgctccgatactttttgatatacggcagccgcagacacgcacagaactgcggccataagaagcagcacagaaacaaaagcagatattttgtgctctttatactttttcttgtcagtattcaataatatccatcctttccgcataggaaacttctctaatcatcctgtgccagatcccggatccttccctccatctgagcgtccacagcagtatctctgtgctgttcaaaatacagcgccatggcgtcgcggtatgtcagtcccgtctcttttataagtgtcacactgccctttggaacagtatcatcatagtaattgagcatcgtatacccgtcgccgtttccctctgcataacttctcaggccggccatatagtctgtcacagcaatctggcagcgggtgtctgcgtccacttctgtcccatcagacaatgtcacgcttacgatccggcttccggccggctttgtactgtcaaaagtatactgaagtcctgagacctgtagaaaccggccgccggggaactcctccgaacaggtagacacactgttctccagcatctcccacactgttttcccatccatctcaagcacaatgatcttattgtcaaacggacacactgcggcaatgtccccgccgtagacgactccttcaaaaaaactggcccgtatccctccgccgttgacgaccgcgatcggggctccggatgcctcggcaacacaatctgctataaaattgccgatctcggtctcgcccagccgtatattaaaattctggagcagcagatcatggctcacctcgccaatgaccgtgaaatcatacgacagtttatccgcaccttcataattgtattgatctactgcctgtaaggcttcctccaccgaacattttccgttcatgatgtttctcacacagccgccaaaatattccaccgttttgcccggaaacagtacattgtagatatatcccgactccacatattcctctacgcctcctgggatcgattccttcggctgctcgtggtcgcgcaggcaggacgtgcccccgcccagatccgcgatcagggcatcctgtccctcctgcgtcgagagcagctccagaatccgacggcacgcctcctgtttttcttcgcccgtgttcttgttgatccccatgagcgcagaaggcgcaaacagaaaccatggctcatttcctttatcgctgaaaaacggaagcattcggtatgtatatgctgtaccggtcccttccttcaccgctttctcattgtctgcaacgcattcataatatagtgcggaatccccgaaagcggcggcaagggtgccgtccacaagacgctcctggcagaggatggaattgcgctgacggccgatcgctgcaggatccataacacatgcatttacaagagaatcggacaatgaaaagctctgttcccagacaccggaaaaggctgcctctttatttttaaaatctgccagccattttacgccctcaaccgttccgagaaaatccggcaccatgcacccgacgtagaacatgcccactgacgtgttatagtcactcataatactaaaatttatgtcgtcctcaccgatcccgatccctttttcccgcatttcggagagagctgacacaagttccgtgttatttgcgggcagagacagtcccgcctgctcaaacagtgtttcgttgaccacatatccgctgtacaccccgggaagcggaatcagatacgtttttccattttgtttccaggcattcatgatcgtgccgtcatacgcctcgctcgcctttgtgtcactgagatcgagcagatattcctgtaccatagttgaatcaggctgcggggtgaacaccaggtccggtcctacacctttttcaagacgccggatctgctcgctggaatagggcgatatttctacctgcagatcaatgtcatcataggtggactccaccaggtcctccacttccttaaaattattggaataaagaattttaattactgtcttttccctgttctcctgccggctgcagcctgaagccgcccccaatatcatggctgcactcaatatacatgcaattcccctggaaacactgcgtttcatatcgctctccctttctttctgcgcgccgcaccggccgctttgccggtccgccgcggcgcgccctttgaatatactcaaatctgtttggctgaccggttcaaacagatcggtcatttcttggaaccttatccatattattataaggcagaatatggtactttgcaataaaaagcaccggttccggacgccgatgcattttgccatgcctttttaacagcggacgcaggacaaaaaaacagcgctggatatttatattcaaatatccagcgcctgccctcatattttattcagtatgtctcaccgtttcgcccggcacgccgcgtcttcaaacgcccggtccagaatgcgggcgttctgcactgtctcctccatggatacgagcggtttctccccgtccagtatacatctgccaaactgttctgcttccagcatataattatccggacacattacggtgtattccgtcttaacctcgtccaaaacctccacattatccacataagcgcctgtggagactgtaaacttgcttacatttctgcagttgaaattgcacggaacttcgatccgccccttttctccaaccacagcataatatcccctcgcgtaagaattgagagaggagtagcctgccgcctgtgtgccgtcttcgtacttgagcaggaatgtattgcttacatccaccccgtacctttcgtccatctcggcaaatgccttgacacattccggttccttcccgagcaggtagcttatgacactgacattgtagcaggccatatcataaaaagcgccccctcccaggttcctgtccatccttatgttggacatgtccgtaagtacatccgtcagatgggattccatatacttcaccttccctaccgcgccttcctctatgagctccttgaccttatttacaagggggctgtggcggtaggcaaacgcctccatgagcagcacgccgttctcccggcatatctcaaacatcctcttggcctcttcctcattcatggcgatcggtttctcacacaaaatgtgcttaccggccctggcggccttttccacccactcaaagtgcatcgaattcgggagcggtatgtacacggcctccacctgatcatcctccagcagcttctcgtaactgtcataagccttctccgctccaaacagtctttggaactcttttgccttggcacttccccggcttgcaacggcatacagcctggcgttatccgcctggagcagcccgggtatcattcttattctggcaattccggcacagccgagaacgccccagttcaccattttacccatcatctattcctgcctttcctcgttggggtttgttggggacgggggaaaattaattttcccccgtccccagcctcgttttcccctgtccccaatcttatttcagggtgtccctatctgccttctacaaattctctcatgccctggaagatgagccagacggaagtggctcctgcatcctggtggccgatggcccgctccatgagtgatttcgctctcccgaatctggcgatatactttttcgtatcttccatgccttgtcttgctgcctcttccgcggccttcagcatatccaaaaggctgccggatgcctcccgctccatcgcttctactgcgggagccagcgcgtctaccatcgtcttgtctcccacttctgctttcccgcgctcctggatcgcgagaagactctttctttccatcgccgccagatcggctgccgtcagctcttctttgggctccatgtcttttgctccggccaggtaaaggcttccgaagatgacgccggacgccccgcccatggacatgagcatggctttccccgccgcctcgaacagtgcatagacatttgttgcgtcctgcatctgaagcagctttttcttcgccttctgcatacctcccgccataccgatgccgtggtcaccgtcgccgatcacgctgtcgatctctgtgagatacggtttggcggcaatgatcttatcagcgatgtacaaaagcatgtttcttgcgtcggcagcattcagcctgtcaagcaccccttctttgcttcttacgataacagcctcgtcaacgtctgtctcgtcaaactccggctcttcttcctcctcaccgtcgtccgccgcgctcacggcgccggtcagctcccctttcgcataatacggggaatagcacggcgcatcataatactgcttcagttcctcgtccagctttaatatggtgatggagaatcctcccatctccatacatgtacagtacgtcttcacttccgcgtcgtgcaccttcagcccgtccgccgccatccgcctgtgcaggtcataatacacgatgttcagctccagcagcggtgtggagccaagcccgttcacaaggaccgcgacttcatctcccgtcttcaggcccatctctgctttcagctcttcatacatcctgtccacaagctcatccgccggcttcatcttcgtacgttcgatccccggctcgccgtggagtcccatgccgaattccacctcgtcctccggcagttcaaaggtaggcttgtcattgcccggcagcgttcccggagaggtggcaagcccgatcgtattgatattgtccctcgccttttcggcgatgcgcacgacttcgtcaaacgcaaggccggcatcgcatgccgccccggcggtcttaatgacgaagacatcccccgcgatgccccggcggtcggtgatcctctctttcggcgcggaagcgcagtcgtcccacacgcgcacgtgcgcggtctgaataccgtccgccctgcacagttcttccgccatgtcaaaattcagattatccccggcgtaacatccgtagatgaataaaactcccttcccctgatccaccgctttcgccgtctcatagatcagctccgggttcggggaggcgcatatgttgccgcaggcgactccatctgccagtccggcgccgcagtatccggagaacagtggctcgtgtccgcttccgccgccgatgacgagggcaaccttgtctttcctgtgtcccttgtacataaatgcattgtattccccgatttttttataatagcgcctgtacgcggacaggtagccggcaagcatctcttccacgacatttgacacatccgcatttaatatctttttcatggcaccctttcctccttcttatcctttactccacattcctgtgccgcccggacatcttctcaaacgtcagtcccggcgtctcgtccacgatcgtcataacgatcatatcaaacaggatgagcagacactgttcaaacagattgcccatcggctggaaggacgccaccacatcatccgtccccctgtacaccgccgccggcacaaaaaacactttgtccgccacgtgctgtgccgtacgcccgctcggcgatccggtcaccacatatatgaacgccccggcttcctttgcccgctcacagatatagttgatatgcccgatgcagccgtctcccagcgtcgctatgagcaggtcgccctccccgatggaaggcgtcgtgtcgtcccagatccagtggatctccttgcccatatgcatgagccgcatggcaaatgctctcgtcgccatcccctcgcgtccgactcctatgagaaaaatgcgtccatgctttttcacttcctcaatgaacgcccgcatccccgcctcatccagcttttcaaacacctgtctgtactcggaaagcatccgttcatacatctctttatattccatatgtaagcctcctttatccaagctctctgtgaaggtagtccatcgtctttttcatgccgtcatagaccgcgtcgtcctcgtcttcaaatattgtgacaacttccagatactgcatgacatcgtctagtcccgcgtctgccgtggcgcgttttatcagttccggcgttacgatcccttcttttgtaaagtcccagtggcggtcccaccggccgtctgtctgctgcagatggatggagccgatgtaaggagcgcacgtatggaaccacagctcaatgtccgcttcttccttaagcagcggtctaaagagcgcatgcccccagtccaccagaagcctgaccggaatatccgtcccctccagatccttcatcatcttgaccgatgcctccgggctgtggggaaattctgttatgagaggggtcgcctcgatatgtatctcttctatccctttctctttcccgtaggaggccaggcgtcttacataatcgagcatttcttcgtacaatgcttcccgcctggcaggatctttcgcgtcatcgtatgacattccgcccaccggcgtccccatcacctttgcccccatgactgccgtcaggtcaatggcccgtttgaagaagagaaacgccgcctccctctgctcctttgacggggcgagaaaatgcccgtaggaataagaggccagcccgccgaacgtggcgtcgatatgcacgccggcttttgcaaatgcgtctctgtagcgcagcgccagtacatctcttaattcttccggccaccacggatcgatcaggtcccatgtaaactgcacgtgatccgtgccaaagtcatttttgcacatgagagccagcttttccggatccataaaacgctttacggcaaatgacagatttaatcccagtttcatattttattctcctttccggacatggaccgtctctgtgcgtaagtccatgcgatcattaaccaagctttatttttctctgctttctctcccgcatgatctcggagatagagctgaaggatatggcgataacaactacgataccgctgaccgctgactgccagtagacatttacaccgaacagtacgatcatgttctgaatgatactgataatggccgcgcctatgagagcgcccgccgggttaccgatgccgcctgtcagcgagacaccgccgatgacagatgctgcgatagagttcatcggccagttctcaccgatggctgactgtgaggaaccaagccgcgccacgtacaggatacctgcaagagatgagatgaggccgacaatggagtatatcatcactctgattttgtctaccttgatcccgaggatcttggcagcctcacggctgttgccgatcgcgtaaatgtaacgtcctgtttttgtcttctttaccataaatataataaggatgagaacggccacacagaacacgaacggaaacgggaccggaccgaggttccctttgccgagtatgtagatatcccccggaattcccgtgatcgcctttccttttgtaagtacaaggttgatgcctccgtacactccctgcataccgatcgtggctaccatagaattcagtcttaactttgtgatgatcagaccgttgatacagccgaacacaaggccgagcagaagcgccagcgccagtgagagccacgggttaaatccgtaattgaccatcatcatacctgcgagaataccgcacagcgacgctatctttccgacggacagatccagctctccgatgagcagaagcagcgactgggcaataccgatcattccgatgaatgccagatctctgatgagagactgcaggttatatatatccagaaaatacggagaagctacactcgcaataatgatcatcagcagcagtacgacgccgatcgctgtcatattacttttcttcaacgcatttacgaagacgttgtttgtctttgttttctctttattcataataaacgactcctctttctctaagaatttactccaataatagcactcaggattgcttctttatctgcctctgcgtcatactctccggcctttttcccttcgtacagcgcaatgatcctgttggagcacttttttatctcctccatctccgacgatatgaggatgatcccgatccctttatcctctgccagttctttcatgaggcggtatatctctgcttttgtcccgacgtcgatccccttcgtcggttcatcaaacacaagcaccttcggactgcagcacatagagcgtccgattatgactttctgctggttgccgccgcttaagaactgtatctccttctctgcgtccggcgtcttgacatcatatgtatcaatgatcctgcccgcaagctcgtcttcttttcttttagatatgctgaagccgcttttcaggtcttcgagagcggagacggaaatgttctcacggatggacagcaccgggaggatcccctgtttcttccgctcctccggcagataaatgaacccgtggttcacagaataattcgtatctcccagtttccagtcctcaccgtccagctttacactgccggaataaacaggaaggtaaccgaagatcgcctgcatcagttcgcttctccccgcgcctaccaggcctgaaaaacctaatatctctccttttttcaaggtaaaacttacatccgtgaaccgctctcccgtcagtttgttcacttcgagaagcacttcatctgtgaccttgtcagaataaaagacctgctcctggtcgagctcccgtcctgtcatctgccggatcacccacggtatatctatctcttccaatttggaataagcaactttttttccattccggaacactgtcagcacatcgccgagggcaaatatctcttccagcttatgggaaatgaatatgatcgctttgttttctgctttaatttcttttacaatgtcaaataatatctgtgtatcactcgttgtcagacttgtcgtcggttcgtccagcatcagcacttcataatcctcatggacggctgctcttgcgatctggagcagctgctgcgcggagacggatatatcttttacaagatcatccggcttaaccggaatgcggaacttttcaagcagcggaaccgcttttttctcaagttctttctggtttacaattcctttcaggccagatttctcatatggcaggaacaggttctcggcgacggacatatagccgaacagatctatctcctgcggcacatatgccactttgtcaaaaagcactttgttcttcagcgcatcctcaccgccgatcagaacctgaccttcctccggctcatatactcctgtcagacacttgataagtgtacttttccccgctccgttctcaccgatgacacagtggatctctcctggcccaaaggatacatctaccgaatcaagggcgacgacgcccgggaataatttcgtgatattttgtgcctctaatactttcatagacatgctccttttaaaaaaacgaagggcgagtaacttgaattaatccagtcacaagccccccgtttttagtcattctgattgttattcacttacagttttgatccattcgtcgatgtttgtctcatcgatgtatgcgatacctgtgtcaaccttctgcggaatttcgattccgatggactgctgccacatcatcagcactgccatagagccctgcatctgcggtattgtggaagatgtcgctgagatagtgccgctcttaacgtagtccagaatctcaatgaggttatccattgccacgaatgtgacatcaccggcttttccagcttcctcgatggctgccgccacaccggaaccgcaggcgtcacagttcagatatcctttcaggtccggattggccgcaagaactgccgctgcctgggactgtgcttcttctacgttgtcgttgtcgataccgccgtcgatcacttcgatattcggatatttcttcagtgcgtccagatgcgcctgatatctttctgcatggtttggagcagatgggaatccctgcattactgcaacttttcctttttctccgataagctctgcaagtttgtctgccgcgatagtcgcctgctctttaaagtcgttgcccacgcttgtaagtccgctgccttccggtgacggagcgtcaaagagcacgaccgggataccctgggactggatctcttcgatgaccgccttgcttccctcatagtctacagggtcgaccgcgatgccgtccggctttgttgcggccgcctgctccataacagagttctgctctgccacatcagacttggatggcgcgcggtagtcgatcttgacttctacgccgagctggtcagagagtgcgtcagcctgaagctgcgcgcctttgttgacttcatcaaaccaggcatgcacacatttaggtacaacaacaaatgtcaggtcctcaccttttttcgcctctcccccggcgtcttttttggactcgccagagttacatcctacgagcattgcagtaaccataactgctgccagcagaaccgataaaactttctttttcatttacatttcctcctttatgctagttctttccctcttggaatggttttattatacatggaggaaaatcagaatccaatgtgacaggatttagattaagtgtgaacattttaaggcatttgccgcagcctctaatcaaggcttatgatcttgtcggagatgtcctccacatactcctccctggacttcaggatgatcacggcagttcctctgttggcaaactttttgatgtaagatttcacgatcgataccccgtatacgtcgcactgggcaaagggctcaaacaggacgagcaccttcggattgtagatataccagcgctcacaggtgacgcttatgaggtcgttcacctccaggctgcccgcctccatgtctggcagcacggcgtcgctgtccatattctgtttcagcatcttcgatatccgcccggacgacgcaatatattctacggatgatattttcccgagagaaggcaggagcaggttctgccccgcggacattcgggtgaacacttcctccttgctccccatatgcatgacagacacgaccttgccgtgcacgaagccgctgaaatcaccggaagcgtactcctgcgagtcgacgatgcagtaagtatctcttccggcctgtcgcccggaaagcagcagaaacagcctctccttttctttgctatccagcacaagaaaggtgactacctctcccctcgaaaagttgaagtcaccttttctgccgtccttaagctttagccctctgacacggtataccgtctttttttcttcgctctgctccagtgtatagctgtccatatgcttctttttggatttgattgtgctgccgagcagaaacttttccaggtgtgcgccgtcctgtatataatccttcctgcactttttcacgatccgtccctttttcataatgatatatttatccgacaggatagacagcaccatatcagaatgactgtttacaatgactgccaggctgcctttggcaagctgcttcatgactcgggcaaattccccgatggattccggacgcattccctcgaattcgtcttccacaatgacgatccgcgccccgtgccttctcgcttttaccatgtcggcgatccttttttccagttcggtcagatctttcagtttccgggagacgtcgaagggaatgcctagttccttaaaatacgcatccgtctcctcctccagaagccgtcttttccagagcatctgaaaccagcctgaatctacgagccctatgtattctgccaccgtccagtcgtctatcgtgtagttggaggctgctatgcggtacactttgcccgccagttcttcctgatcggacatcttcaccccgtccacgtagatgttaaaatcctggatatctgcctccgcctctttgctcagcaggcggacgagcagatcttttcccgagtaggtaagcccgaggaagccgacgctctccccctccagaatgcacatggagatattttccaacctccggttgccggcatacgtatagttcaaattgttaatccgcagtatttctttcttcatcttccaagccaccgcctctctcatatccggccggcacagtgatctccacatccgtcccctggccgacggtactgtatacatttaccccgtactcctccccgaaaagcagctggatcctcttgtggatatttggaagcgcgatccctgtgttccgctgtctgctgccgccgtcataaagctgcatatcctgcgacttgatcctggcgttcagttctttcagttcaccgctttcgatcccttttccattgtcggatatggtgacgatgaggttgctttccgtgacgatgacttcaattatcacttttcctccttccagcttctcttccagaccgtggaagatcgcattttccacaacgggctggatgatcagtctcggaatgaggaagtcatatgccgcctcatcctcctcatcaataatgatctccatggaaaaacggttgttgaagcggtagcgctgtatgagcatatagttgttaatattggcaaattcgtcacgcagcgtgactagattgccttttccgctgatgctgtaccggaaaaatgccgccagcgcctccaccatcctggcgatctctatattgtcgtccatcagcgcctgcccccggatcgactcaagcgtgttgtagagaaaatgcgggttgatctggctctggagcgcagtgagctctgtctgcttgtcaaagatctttgcggaactcttgcgcgtccgctgattagcgtatctgtccgcaaggcgttctatctgtcccatatacgggacgcgccccgccgcctgcctgagctcttcctcaacgttttcatccgttgtaccgtctttctgcgtgaagccgtccagtgtctctgcaaagtttttaacagggatatagacagctgccgccagatagactaacattccggcctggatgaggataactgccggaatcatttccggggcatatccatttctttccactataataaaaagaaggagcaggaagacaatttcacttaatattaccgttctcaatcttctgaccagtttcatattctcctcctaagaatgcagcttgcggtacagcgccggtttcacaccgactacttttgcgaatgtctggctgaaatatcgggagtctttatatccgacgcgctctccgatggccgctatcgtctcgtttgagctgcagagcatctccttcgccttctccatgcgcacgttcatgagataagcgctgaagttcatgcccgcttcttttttgaacagtacgctgaaataaaccgggttcagcccgatgacttccgcgatatcttccagcacgatcttttcgttgtagtgctcgtcaatgtactgcttcgcctggcggacgggctttaccgactcgtcctccgcagccgcccggttcatgtcaagatagctgccaagttcggtcttaagcaggttcttaagctgtgtgatcgaataacagtgctgacagctgccgccaagcctttttctcaactggcgcgactcttcctggtggaggtccatgtaaccgaagaaaaggtcgatcagttcctccgcagcggtatagcatccggagaagtcaatgtcatcgtgcagcatgaaactgctgaatatctggttgagacactgctccatattctctcttgaatacacttccaggctggccaggaagctttcccggtaccgctccaccggattttcgtccgtattgtctactccccgcgccgcggcctctgcgtagatgagccgcccggtccccattttaatacggtttccgaccgcccggtttgcctccctgatggaaaaccggatccccgcaaagtccgtccgctctgtgccgacgccgatcgtcacctcatactgctcgaaacctatgagatactcttttatctccgagaggatgtcattgatgctgtttttgatcagcttggctctgctgtaatcatagttaaacagacagtagatatgcaggttctccttttcacatatgagcacttcctcggacacttctttcagtatcccctccacgatcgtgacaatacgctccaccgtcagccggtcctgcttccggtcactcttactgtaatccacataatcaagcttgatgtcgatcccccggtagacctccccctcaagggcgactctcgcatcctccacctcgtccgcgtcttcctgctcgataatatttttcagaaagtcacgcttgatgatctgccggctctgcgtcaccttctcctgcagctcctgcctctcctttatctggtgctccttctgcaggaattccttatgtattttcttcaacactttattcagctcatcttcactgatcggcttcagcagatagtcgtccaccccgtactgaagcgcccggtgcgcgtactcgaattctttatacccgctgatcacgacaaacttgatgtctctgcttatctcccgcgtcatgcagatcagatcaaggccgctcagcttcggcatacggatatctgtgataacaatgtccggcctcttttccttgatgatctggaacgcagtctccccattgtccacggcatccacaaattccatatcatactcgtcccacttgatcagcttcctgatcaacattccaatcctaaattcatcgtccacaatcagtacacgccattttctattctgcatcccttacaccttccgtcaattttacctgttatcgttatgtaaaatttattatgttatattataatggtttaatatttaattagcaacacgggaatgactggggacaccctgaaacgagatggggacggaggaaaattaattttcctccgtccccatctcgtttcagggtgtccccagcccatacggttctattttccactctttcatctcatcttccggcggtctttcatacaagccccgcctgctgaagctccagcctgccttttccttcatctccaaaagatattcggtatgcttaagacccgccaccatggaatcgatcaccggtacgtggaattctttctgaagctcctcatagaatccaaactgcatactgcacccaaggatgatcacttccgcgcggtctgtctcgatcgccgcccggatctcccgcttcatccgccggaccgtctcttcttcattctcgtggaactcaagcactcccataccgaggctcctgaaggaggcaagcttgcttaaaaggccgtatctgtggacattttctttcatctgggggatccacttatcccgccccactatgaccgaaaactggttccccagcacggccgccagatgcatactcgcttcgccgggcgccgtgacgactatgttccggctgatctcccgcgccgggtataaaaagggatcgtcaaagcagctgatgatcaccgcgtcaaacccatccttttctgccctcagcacttcttttaagatgccgtttcccgcaatggcctgataatactgatattccaaatgcttcggaccggtatccaggcttctcacctcgagctccgtattggcatccttatattggcacagataagatcggatcgttggatttagatcactgtatgcaactgcttttaaaaataagattcgtttttttcccatatacgctccctgcctgtatgttaatatcccgcgactcccagttccgcacagatcttcctggcagtctcatcgacaaacacaccatcttcttccagtttttcaccgtccagtatgatcgtcggacgcagtaccgttccatcggagtgtgaggcagcgctccagtgggcgccgccgatcttgatgccctggctgccgatcccaaattccatacagccgaacacccgctcgtcctccacgatacgcccggtcacttttctcactcccggattgaatccctgtgagtaatgtgcaaggcgcagcatattcggatcgtcaaaagagtacagccagttcttatatatttccgcctctgctcctcccgtcacatccacaacacgtccttccttgaaatcaatgcagatcttatctctcagaacaccgagtgtatccggcgggaatacagccccgtcaaatacgagctttccttctatcgattcctctaccggacaccagcttgtctggccggtgagcatgaccggatatcctttttccgacgctttgatccccgaatggcggaccttgcgccctcccatgctgccgcgaaggtccatcccctcctttgacagcagatgaatatcctgcgccttttccaggcggtatttgaaatactcacccagctcgatcaccttatcaatattcacttttccgatacaatttactaacatttccgtatcaagaccggtggcgcagatgtaccgcgcaccgttttcatccactgccctgcggtaagcaggcccgtgcatgatggaggcataagtcagctcgatccacacatccgccgccgcgatcgcatcggcgaccggctgcgggggatccgcgtaaaatccctctgccgtcggataatagatgaccgtcgggacggtctctatcgtgtaagccgcttctgtcaacgcatgaacgacccgctcgtcaatgcacgtatcatatgtgatcacaagattttctcccggcttacagagcatgatatcccgcacgagcttcatcgccgctctggcaagttccattctccggtattcaccgcgcatttcaactccaagattccattccatattgtatcctcctacttcttataatgttccagattgttatccgcatattgatatgtttcatattttttatatatatggggaagctttaaactgtcccactcaagtcttgccctggcgtctttgatctcctgccttgaaagtatcacttccacatagccttccctgtcatcttcaagactgcataacaagtttccttccggccccatcacagacgttccgccgcagtaccttacatccccggaagcacggttgagcgctgcggtgtagatctgattttcagccgccctcatccgcgcgcagagatgaaataaatctttccagccgtccgcccaggcgctcggatacacgagcacatccgcccccatattggaaagcggtgtggaaatctcaaaaaagcgcatatccgcacatatgagcattccgatctgaaagcctctgtagggaaccaggaccaattcgtccccgtgtgtaaaaaattcgcgctccttatcccacagatgtatctttttgtactcgcccaaaagcgttccatattcatcccacatacatgcggcgtcataatacgcgtctccttcttttacacagacgcccgccagtatcgcggtattgcactcttttgccagggcggaataaaactccttttcctctccggacccttctgccctgtgaaaatcatacccgctgatgctaagctccggaaagcacagcagatcaacctctctttttgcataagtcaaggcaagctctctcacatgcgcgcagtttttctctatctcaccttctgtgaccgcaagctgcacgagtcccatcttcagcaatatgcccactcctttccatctcttttcgtcaggaaatgttcagcagcacatagagcgcctgcgcgtagatctttgcggacaatataagatcctccacgctgatgtattcatccggctcatgtgccagttccctctgtcccggaaaaacaggaccgtaagcggcaaaattttccgccgccctgcaataggtgcccccgccgatcacgacaggctcttcctctctcccggcgctttcccggtacacattcagcaatgtctgtatgaggggcgctttcacaggcatataaatgtgcttcttgtcctgataaatatcaagttccaccttctgctgcccacacgccacctttaacgtctttaagatcacttcctcagaagcatggatcggataacggatctccactgtcgccttgccggaaccttctcccagctccagtacgccaagagagagtgtcaggatcccggacagcttatcctcgcacgcgatcccgaggcgttccccccggtaaccgtctccgaataactcttcgatctttccggcaaaccgggcgccgcccccttcctctaacggcagcctgtgcaggaactctaaaagcgtctggatcgcgttttcaccattccacggctgcgaggagtggccgcccagtccttttgcctctattttccagcccgtgttctgcttagaaatagagatattgtcctttttggcaaaaccgtcccttgcctcctgtaacatgtgctccgcgtcttctgtcccgtcaacggccgcgtatgcatatcccggaactacgttcacctttgtcccgccccggatctccttcaggtacatgccgccggcgtgttttgtctcctcccatgtgtccgatacataaaaccggaggatccccttttccgcatggatgaccgggaactccccgtccggcgagaaccctccccagggcgcttcttcttttttcagatagtatttcagcccccgcataaaaccgctttcttcgtctgtcccgatgatgtggcacacgtggttcttcaccggaagcccgctctcttttactgctttcatcgcaaaaagagctgccgccatcggccctttatcgtccagcgaacctcttccgtacaatctgccgttgtcaagggtgccctcgaaaggacggtacgtccatccgtctcccggaggcactacgtcaatatgggtcagaatgcctatctgcttccctttctgcccccacttgaccgtgcccgcatacccttcatgatttctggtctcaaagccaagctcttctgccacagacagcacttcctcaagggccgcttcaatgggctctccaaacggcgccccttctctgccctcttcataaaggctaggatgtgcgatgagcctttgtgtcgttttaataatctcttctttgtactgctcgatcaggtcatttaatatgtgctccaccgtatcccctctttctcctccttatctgcccaatctggccgcatactcttttaagtcttcatcaacgatctttccgtccttcgtaatggccgtcccatccaggtaaatggacacgctcagacaggtggcatcgatgtgggacggcgccgggaccccgtccggcggcacgaggaaacttccaatcgccccaaagccccactgggaaccgccgaagatccgctcatcctctccgagctgtcccgttaattttgcattcggatggaatccgacgcagacatgggcgggccggagcatctgcggatgatggaagtctctcatatatttctcccactgtctggcagaggagccgccttctacatggtcgatgacgccatccttcatgtatatcttcaccggctccttcagcaccccgaactgcggcacgagcgacccgtcaatggcaatgacgccgttcaccgtatccagatccggcgtccatgagatcatgcccgccagcatatgtgtccccggttcatccgcatatccgtcccgtgcgttgatcgggtgatccgggtggttgtcaaatgagatatcttcaccggccgtgcttgtgaggcgtacatgctttgccgcgcgtatcttatcccgcaccgcatgcagaagatcccggagcgccccgtggtctgtattggcaaacaggcggataaatacatccacatacattcccggaagacacaagaaccgcagttttttattcgtgtgcgccacttcctcatacgtgctggaatacagaaaatacatggcattgtactcgatccagcagtctgcttccagaagcgctgcttttatcgccgcagacggcagaaaaccgtccacctgctttcctggtcccggcggtgtcgcagtccagatcaccatcggtttggccccggccgcatacacggcccgcgcggtggcatttactacacgctcatcgctctttgtatctgcggtgatcacaaagctttcgccgggctttactttaaaaagctccttcacgataacttctgcagcctttcctatctcaaattcatataaaaagtcactcactttatcacacctttccttgcgtacatgtcagtctgcctgccagttccttcagttcctcatctatgagcgtcccgtgaagccagagcggtttttcgtccagatagatgtctgtatttaaggagaccgcgtcggaatgggacggcgcgtacacgccctccggcggcagcataccggccccgatgcttccaaatccccacgtcgtagatccccatacccgctggtccagcagaatatctccgatcacgcccgcgcccgggtggaagcctatgccggcatgtgacacccgaagcatctggggatgtgcaaatcctttcagccacgcctcatactttttcgcctcttctccaccgtcgatcgaccggatacagccgcgctccacacggatctttaccggcgtcgtgatgatgccgatgtccggcgccacggaaccgtcaagacagatgacaccgttcacactctctatatccggtgtccatccgatctgccccatgaaaagatgcgtccccggaacactggcatctcccagcttgcacgatatgggcctttcctgtacattttcaaaggaaaggacatcccccatctgagataccatgcgcacctgctttgcgcccgcgatcttatcccgcagtatgacggtaaaccggcgcatggcaggataatttacatttccgacacagcggatgagcgtatccgccgtcgtgccggtcagacacatgtgccggaggctcgggtttaccttttttgctctgtaaaatggtgtggaatataagagccatttcacattcagctcgatccagatgtccgcatgggcgagcagcccgcttaagccatctacctggatatccttatccgctgcgagacttacccccgacggtgtggggatcagggcgatgagcggctttgcccccgccatggccgcggcccgtccgactgcctcgatgacggacatgtcggacgccgtatccccggtgatcgcgacgatctcacctttttgtgttttgagcaggtcatttatcagcacttcggctgcaaattgtaattcacgtcctatcactcttcctgcgcctccttctgttcctccaaaccgcgctttgcaaacttatgacagcagacaaaatgctccggtccgatctccgtcatagtcggagcctctgccttacagatatccatacaatcgcggcatcttgtgtggaacgtacaaccgctgggcgcgtttaccggagaggggatctccccctgtgaagtgatctgttccggcttcatcgcctcctcttcttccgttgccaccggaatggaagacaaaagcatctgtgtgtaaggatgcagcggcgcgtcaaaaaattctttcgtcggagcaagttcacagagcctgccgagatacaggatagccacccgggtcgccacgttgcgcatcaggctcaggtcatgggtgatgaacagatacgacagctcaagttccttctgcagctcgatcagtgtattgataacctttgcctgtaccgatacatcgagggcagacgtcggttcatccagaatgatcagttccgggttcgtggccagcgctctcgccacggacacaagttgtctctctccgccgccgatgttgcggggcatcttatttttatattccttcgggagccctacctcctccaggagactttcgatccgcgcctgtttcttttcttttgacatcttgtcatggatgtcaagcgggacctgcatgctcttttcgatcgtccggcgcgcattcagcgaagaacccgggtcctggaatacgatctgtatttcccctttctgccgcagcgtacgcttgtatcctttttttacaaggtccgtccctttataacacacttctccatctgtagctccatacattccgactactgtataagcaatcgtactttttccgcatcccgactcaccgaccagccccagcgtctctcctttatacagatccatgctgacgccgtccacagcctttaccgtctgtccgttccccagaggaaaatactttttcaaatctttgatctccaaaattttctccggcattattttccctcctctgcttgaaagcaagccacccaatgctctgcgctgatctcatgccttaccggtttctcatttctgcacctttcatcagcgtacgggcagcggggagcaaagcggcagcccttcggcggattgctgtaatccggtatccgcccagggattcctttcgcaataccgctgccggtcagtttcggcagacagtccatcaatgcctgtgtatatggatgctgcgggttttcaaatacctgcttcgtctccccgccttccacgatcgtgccagcgtacatgatattgaccgacgtcgtcacctgcctgatcacgccgagggaatgggtcaccattacaaccgacagttcgcctgactcaacaagactcttgatcagtctcaggatctggtcctgtatcgtcacgtccagagccgtccccggctcatctgccagaagcagctgcctctgcgccgccatcgtcatggcaatgcacactctctggcgcataccgcctgagagctgaaacggatagctgttcagtatccggtccgggtctgccagcgacaccgtctccagcgattttgccgctttttcaagaagctctgtttttgtgagttttttatctttgtgcgcatacttcaatgcttccagaaactgatttttaatagagatcaccgggttcagggcgcttgacgggtcctggaagatcatccccgcccccttctgcctgtattcctgcagtctggcctttggcatttccagtatattttccccttcataaaggatctctccgctttcgatcgttccgttggaaggaagcacatttaaaatcgtccgtaatgttgttgtcttgccgcagccggattccccgacaatgccgacactttttcccttttctacgtcaaatgacacaccttccagaacgtgggtcttaacatttgcaacagtgtaggatacggacaaatccctgacttccagtacgttcgtcttttcttccatctatttgccctccacgttaaagatatttccgacaccatcccccagaaggttaaatccgagcacgataacaatgatcgccactgccggaaatactgcaagccaccacatatccggaagaaatttgacgccgtcgttgatcatatttccaagtgccggtgtaggcggctgttcaccgagacctacaaaactcagtgtcgcccccatacatatgacgtatcccatatcgagcgtcatctttgtcagaatctggtcaaaggtatttggcaggaactccttcaatacaatatggcttaactttgctcctgtcagttctgcgtatacaatataattttccgtcctgagggaggaagccactccaaaggacagccttgcataccagggccaccacatgatcgtgatcgccaccatggaattcttgaggttcggttccaggatcgcggcgatcgcaagtgcaagcacgagagccggcaccgacagaaagatatctacgatccgcatcagtatggtctctatccacgtatctttaaagtatccggccaggacacctacgacaaaccctaccggtaccgcgatcgccagcacgagaactcccatcagaaggctgctccttaagctgatgagcagtctggaaaagacatcccgtcccattgtgtccgtccccataagatgctgcgcgctcggcggctgtgagctttcttcaaacttcactaccggccccgcatcctcgggatacggcgcgatcactggtgcaaagatcgcaagaagtacaatgagcagcacgatcgccagccctaatacagatactttaccagccgcaaacttataccagttttgaatccatgtttctttacgttctgctttcatttacaccacctcctatcttgtccgcttctgccgcattctcgggtccagaatcatcgctacgatatctaccgctatactggtcagcgcaaacgcaagaccgatgatcaaaacgacggcacagactgcatttgtatctttatttaatatcgctgtcattccataactggacagtcccggccagttaaagatccgttctacgagaaatgcatttccgaacatggccgctatatccattcctatcacggtgatggtaggtatcacggacggcttcagcaggaatcttctgtttaccaccgactgcggaaccccctgggacgtcaccatagtgatatagtccttgtccgcattctgcagcatactggaccttgtgatcctggcctcctgcatcgtcttgccaagagcaagcgcaagcgccggaaaaagcaggtgcagaaatgcgtcccaggccgccgccggctttccgccgagcagcgcgtccagcacatacaggcctgtaatgtccggtatcgtgaaggaggggcttaagcgcccccctatcgtcggcataacaggtatccagtatccgaatatgagcacgaacatgacggcaaacacaaaggtcggtgtcgctacaaatatataacccgagaatctgcacacataatcctgccatttattcttatgctgggcacttgtaactccaaggtacagcgccaccaggatcgacggaaacccggcccacaagacaagttcaatggttgccggcgcaaagtctttgatatcctgaatgaccgctctctttgtgaccgccgatgtgccaaagtccccgcgcagcgctccggtcagccagtatccgtactgggcaggcagagactcattcaggtggttgacttctctgtaattctccagcacgtcctcggatacatttgcccccagtgcgagccgcgccgggtcgcccggcacgatccgcatgagaacaaatataatgatcgtcagtccaagtaatacaacgagcgaactaagtaaccgttttaatatactcttcaggagtgacatgatcttatcctcctctctttcccgttatgcgtctttactttttgtccggatataccttgatattcggcatatagttgatatatcccataaccggaacaaggtttgcggggtctgcggcatcatagtctacataatctgaacggtaggcaaagcgaagcgtaacttccgcgatcggtatcatgacgcatttatcggcgagataatcctgtatcccctcgtattttgcgacacgctcttcctggtctaccgttgtcatcgcgtcgtcgatcatgccgtccagcgtcgcatcctcgatccagcagcagttcttccatgtccctgaagtcttggagtggagcgcggactcaaagactgagcctgcctccgggtagtccgcagaaaaccatgtagtcgtcacgttaggcgtcgactcgggtgaagaggaattctctacgacacttgaccacggagtttttactactttgacattcacgccgatctgctgtgccgctgactgaattaaaagagccagcttctcacggtccggagtctcagccacccagcacacttcgatcggataatcctgaatattgtctgcatatttagacttctggatctcttcctttgccttctcaatattaaagctgtattcactcatcttcttaaatccaagtacgtttttggaaataatactttctgctttgacggaattcggatatacatccttgcagactgcgtcgtaatccagcatataagccagcgctttccttacatgttcatcatccgtcggcgctttctggttgttcagcagcagatagatgatatctccctgggtattttccatgatgctgatgccatctaccttgccaagcgcatcaattgtctcagaagtctgatattcatcagagagctccagctctttcctctccagcatcgtcttgactgtcacggcctcattggagccgatcgccttgaactcctccggcgtattctcatccaggcctgcccagtagtctgcgtttttctcacagagcacatgggaatttgccgcgtattcctttaccttgtacggtccgcttcccgcgtcattttcaaggagaaatgcttttccataatcgcccttgtccccgtaatcgcccttcgcgtagttctcttctacgagcttgctgtccagtatgtaaagtcttacgagcgtcgccagaagtgttccggtaggtttattacagacaaactgtaccgtcgtatcgtcgagcgcctttgcctcctcaacaacagagctgaacagatagccaaacccttcgcccatatccaggtttctctgcatcgagtagacaacgtcggctgctgtcagcgggttgccgctgtggaacttcacatcgtcgcgcagcttaaacgtccatgttttcccgtcctcggatgtctcccattctgtggcgatccacggcgccgtactcccgtccttttgaggctgcacaagcggatcgtaaagattgatgagcaccgttgcagcgccaaggtccgaaccgacgcccgggtcgatctgcggcgtggatgtcagcgtatatctgacaatattgtcgccgtcattcgctgtatccccgaccgatggcgtatccccggacttttcctcgtcagacgacgctttaccgcatccggcaaacagggctgctgccataacaacacacagtaaactagaaatcattttcttcatacattaccctcctttatggattttgattgaactatcagaaataatgaccgttttttctttttatttgaaaataaatggtattttttctgattctattgatttactattgattatatcagcctttttgcttataataaaattctaatttataatttatctattactacaaataatagtcagggggcttccgtatgttagatacaagactggtcacatttttaacgctctgccagacaaaaagctttacaaaaacggcagagaaattacatatcacacagcctgccgtctctcatcacatcaagtatctggaagggtattatcacacgaagctttacacctacacaaaccgcaggtttgtcctgactcccaccgggcggaccctgtaccagttcgtcaattccgttcattcggattccgaacgtatcagagaacatctctccttgttgacttcccccacaaaggagctgcggcttggcgcggagcagtctgcgggggaatcttttcttccttatttgatcattgcgtttatgggtaaatatccggattataagattcgggtcgtgaccgacaattatgatgcgctctcaagaatgttaaatgaaggagagcttgacttttttttgatggatggaatcgtatccaaatcagaacatgactattatgaactgtgcagcagcagcacgatctgcgcctgctcgccggatcatccgcttgcggaaaaaacggtctctatccaggagctctataacagcacgctcatactcggtgtcgataaaacgccgtcgaggaaccggctggaacagatcttccgggacaacaatatttcctccatacactttgcgcaccgcatagagatcagcaacagccttactacggtaaagcagctgctgatccagaatatcggcatatcctttctgtataaaagcgctgtggcgagggaattaaaagaaggttctatccggcagatttatatcagagactattatgaatatcattcctataacctgatctctatacataacagttatttttatcccgaacagacagattttattaaattctgccaggactttctgaagcagtgggattctgacatatagctttttgagcgatcttttttccgagttcggcagctctctggcagtccttcggaaactgctccttcttcaccttgagcttctcttcctgggaaaaccgctctgccttatataatgcgtaatcgtcaaactggcacgtgtcaaagcaatggaagatctcgggctttgaaaagacaacgcctgtatattcctccatcgcagaaagcttgatcggataattcatctgtttcatcttttcctcggtcgcattcatcgtgtagagaaacgccgccgggaaacgcttcggcgcaatggatgtgtactccttgccatagacgagatacgggtacagaagacgctccagaaatgcccgcagctgcccgggaatgccgtggaaaaagacaggactgccgatcagaagcccgtccccctcggaaatattctccagaagcccggaaatggaatcccgttttgcacatttcccataagatctcccattgacacgtttacagccgtagcagctgacacagccgctatacgaaaggtcatagacatggatccagttgatctgcgcgtcaggaaggacacttttgatcccctcgactgcacattccaggatctttgctgtgttatggttctttctcggacttccgttcagtacataaaatttcatcataaccctctccttcctgctctccgcccggagcagcagctccattgatttccgttttgcttcattttaacattcgcgcttcggttaatcaacgaattttgggggaattggggacggggaatttttaaaaattccccgtccccaattcgttttcccctgtccccatctcgtttcagggtgtcccctttatccttctacatactctctcatcccctggaggatgagccatacggaggttgcccccgcgtcctggtatccgaccgcccgttccatgagtgactttgcacgtccgaactttgccacatatttcttcgtgtcctctaccccctgggctgcggcggcttccgcggccttcagcatggggagcagaccttgcccgcagcttgctttcattgcgtctgccgccggggagagggcgtctaccatcgtcttgtcccccacctcggccttgcctctttccttgatggcgcgcaggcttttctcttccatccggaccagatcttctgccgttatgaccggtttgggctccatgccttttgcccctgccaggtaaaggctcccgaagatgacgccggaggcgcctcccatggacatgagcatggccttgccggccgcctcgaagactgcatacacattcttctcgccggtcattttttccagcgcttcttttgcctttttcatcccgccggccatgccgatgccgtggtccccgtcgccgatggcgctgtctatttccgtcagatacggcttcttctcaataatcttatctgcaatgtacacaagcattcttctggcgtcttctgcgctcagttcttccagcgcgcccttacgctctctttccggctctgcggcggcgggtgcgtccttaccgggatccttccgcgtttcgtccccttgccctgcttcttctgtgcatctgtcttcttctccagacgcgcacgcacgctctgtcagttccccttttgcgtaatacgggcaccagcaggggctgtcgtagtagcctttcagctcctcgtccagctggaaaaaggtgacggaaaagcctcccatctcctggcttgtgcagtagttgttcaggtctgcatcatacactctgatcccgtcctgatcgagcagttttttgatcttgcggtagacgatggcaagctctgtgatcgtcgtggaaccaagcccgttcacgagcacacacacttcatccccttcccgcagatctgtgtcgtcctttatctgggcgtaaatcttttccgccagcacatcggcgggctgccacgccgtccgcagcacgccccgctctccgtgcaggcccatgccgtactctatctcgtcttcccccagctcaaagataggcttatccaccccgggaagctgcgccggagccgtggcgacccccactgtcctcgtatgatcccgtgctttctccgtaacccgcaccacttcctcaagactcagtccggcgtcacacgccgcgcccgcggtcttcaccacaaatacgtcgcccgcgattcctctccggtcttccatgcgctctttcggcgcgcttgccacgtcgtcccggacacggacatgggccgtccggatgccgtcgtctcttagaaactcttcacccatatcaaagtttaagttatcccccgcgtaacagccatatacgaaaagcactcctttgccgctgtcaaccgcttttgcggcctcgtatatcgtgttggggtccggcgaggcaaagatattgccgcaggcagccgcgtccgcaagccctttcccgacaaatcctccgaacatcggctcgtgtccacttccgccgccgatcacaagagccaccttatcttcccgtttctgtctggacagtatggcgttcacctcgggatgcttccggaagtatctgctgtaggcgccggtaaatccttccatcatctccgaaacgacattgtccgcgtcattgattattttcctcatgcttttcccccattctagtatttcactacagcctttatgacatctgacttattgtccacattataggcaactccctcgatcacatccttgaactcgaaaatgtgggagacaatggatttgagcgggatcgtaccttcgcttaccgcctttatcgctgccgggtacagattccggtagcggaagatcgtcttcaggtccccctcttttgcactcagacttccgatatctacgacgatctcaggttccgcgcacatgccgacaagcacgacccgccctccgtttttgatcagcttcgcggactggcgtgtcgtaaactccgcgccggccgtctcaaagacgaggtcaactccccctcccgggagcgtcctgacaaattcttctatattgacatcctttgcgttaaatgcctccttcgcaccgacttcctttgctttttccagacgcttgccgatcatgtcgactgcatagatctcttcgatccctctcgccttgagcaccatgatcgtcacgaggccgatacagccgcagccaagcacgacagcgctctgcccgatctcagcctccgccacctttgcagcgtggaatccaaccgccagcggttcaatgagcgccccttccatcgtgtctacattgtccggcagcttaaagcacatattggccgggtgcacacagtattcagaaaatactccgtcccgctcgttcggaatggccataaaggacatatccgggcagaggttataaagccctttcctgcacatgtcgcacgtaccgcacggaactcccggttcaatggcgatccggtcaccctttttaaatccggtcacctccgggccgacttcttctacgactcctccaggttcgtgtcccagcacaagcgggccgtccggcacccagtttccaagtcttccggcttcataaaaatgcaggtcagaaccgcacacgcccacatactccagcttcacgagcagttccccttttcccggctttggaatgtctttttctgtccattccatctgtcttgcccctgtcatcaccgcaactttcattttaccttccatatatatacctcttttccgtcatttttttgtctgctggaccgctatgatccaataaatatgatatttttttaacaataccttattttttatgtggttgggagttacccaaccacttataatttttctcagggctgattatgttttaccgtcggatcatctttccgcatctattctgcatagatcgtatccagcagctcgtctacgttgtcctttgtgatccatttcatatcaatataagataattctttctctgtcacttttccttccagcacatcatatgccttctgcactgcttcgcttccttccagtcctgcgtcctgatataccgttccaaggagtgtgccgtctttgactgcgttgcagccgtccaggatcgcatcgacgcctgtaacgacgatcttatctgtcaggcctgctgcctccagcgcctggatcgcgccgagcgccatctcgtcgttgtgtgccacgatagcgtctatcttgccgctgaatgtttccagccagttctctacgagagtgagcgcttcctcacggctccagtttgctgtctggtcggccagcacgttgatcttgccctcgtatttgtcaagtatattctggtttccttccagacgctgtatctgtgcggactgtccgatcggtccttccagaatgacaacatttccttctccgccgatctcatctatggcattctgcatctcaagctcgcctgccagtacatcgtccggtcctacataatgataaggctcctctgtattgaacagcatgttcacaccgacaagcgggatccccgcgtcgtcacacatctctatggcgggaaggatcgcatccgagtccaccgccgcaacgatgatgacatcgactttctgcgcgatcaggttttcgatctgtgtgatctggttctgggcatcctgctgtgcgtcgagcatgacaaggtcacagccaagctcctccgcctttttctccataccttctgtcatgagcgtaacgaactcggtcatgtaatagactgtacagccgatcgtatatcctccgtccttctttgacgccttcttatcatctcctttgctgtcgcttccctccgtacctgagctgcatccaagcagcagagccgccgccatggctgctacgagtaaaatagataacattctttttttcataactttccctcctgatattattgattccgttttgaatcgattaaaatcgccccgagaataatcaacccttttacgatctgctggtagaacgaagacacattcataagatcaagtccgttatttacgatacctaacaagatcgctcctacgatcgttccccacagcctgccccgtcctccggaaaggcttgtgcccccgatgacagtcgcggcgatggcgtccagctcataactttcacctgctgtcggcagccccgcagacacacgggccgtcaatatgatggccgctatcccgcaggcaatgccgcttaacacatacaccatcatctttatgcgcttcacattgatgccggataccatagctgcattttcatttcctccgaccgcatatacataacggccgaactttaactttgtgagcataacgctggccagtataaacacaataatgagtatgatcgtcggcaccggcacaccagcgatgcttcccttgccgatggcaagaaattccgtcggaaggttcgatataggccgcccggtgctgtatacgtaagtcatgcctcttgctatcgtcatcatagacagtgtcacgacgaacggcgccgcattccagtaagccacaaaataaccgttataaagtcccagcagcccgccgatggcgatggcaatgagcacgatgagcgcgatcggatattccttgtcccttagaaggcccgccgctatgatcccggaaaaggccacgatagaaccgaccgataagtctatcccaccggtcagacatacgatcgtcatcccgatagccagtattccattgatcgatatctgccgcagcacattgagcaggtttgtccctgtcaaaaagttgcccgagataaacgataatatgatcccaagcccgatcactataaaaataagcatatatgtctggatccaattccggtcaaacttctttgtcatctctttcattactgcattcctccttcatcgacatccgaagcgtacatcatgatcttttcctgcgtagcctcttcccttgccagctctcccttttttcttccttcataaaatactacaacacggtccgacatcccaaggatctctggcatttccgatgagataaatatgatcgcctttccttccttggcaagactggccacgagcttgtatatctctgtcttcgcccccacgtcgatgcctctcgtgggctcatcaaagatgagtatatccgggtcctggagcagccatttcgcaagcacgatcttctgctggtttcctccgcttaactgcttgaccatctgctgcatgttcggcgtcttaatgtccagcttctccttgtattcctccgccaccctggcggcctttctccggttgatggcgccgattcggccggaaagctttccaagcgacggaagcactatgttatcgtagacgctcatttcgagaacgaggccgtttcccttccggtcctccgtcacataaccgatcccctttgagatcgcctttcccggtcttggcttgtccatcttttcaccattgacccatattgtgccggacgtcggctgagtgatgccgaacaaagcattcatgacctctgtcctgccggagcccatgagcccggaaaatccgagtatctctccctttctaagttcaaaggaaatatcttcaaacacaccttcctggctcaggttttctaccttcagcacaacgtctcccgcctcgtttgaacgggccggatagatctccgtcagctcccggtccaccatcttgacgaccagttcattttcatcgatctctcctgcgtcataagtaccgatatactgtccgtctctgaatacggttatctcatccgcgatcttaaatacctcgtccatcttatgggtgatatagacgatgcatcttccttcctccttaagcccctttatgatgcggaacagtcctgcaacttctctgtctgttatcgtcgccgaaggctcatccataatgatgacctcggcgtcgtaggagagcgctttagcgatctccaccatctgcatctgagacactgtgagctctttcatgagcttgccgggcggaaggtccactcctaccttctcaagcagcacagctgcctcccggttcatcgtcttataatcgatcagttttcctttacagaactcttttccaagaaacagattctctgcgatcgtcatgtccagaatagggctcagctcctgatgtatcatggaaatgccgtggcttagcgcatgcttcggtgtgtggaaggtgaccttctcgccgtgcagatagatgtctccttcgtcagcctgataaatacctgcaatgatcttcatcaaggttgacttccccgctccgttctctcccataagtgcgtgaactctgccttttatcagcctgaaatttacattggacagcgccaggacccccgggaagcgtttcgtgatatttttcgcctcaagcacaagtccgtcctgcgctctttcctcatttttcataacctttcctcccatttattcatcaccgttcacaggttcctctcgatgactgcatcgtatcacactgccggccggtctcatacttaccatcttcacaataggggggacaatcttcagaagttagaagttttacataattgtcgttttaattttgttatttttttgtctatattgtccatattcataattgctaaatgtacgcccccgcttgatggatcttctgttacagggcaaaaaaatatccccgtccagcggggatattatagtattaagccttctttcctatgcacatctacagttccgagtacaggaactcatacgcctcctcctttcctatcatcctgccatgcctcatatacagctcccggccccggcagtagttcagttctgctgtgttggacgtgatgataaggaccggaatgttcctcttctccagcatatatatcatctccctcgccgtctccctcgcctggatatccccctccgcaaaaggctggatacagacaagcagctggggggagtagatgagccaccggcagtacacgatccgctgtacatccgccggagagagctcttttacttttttagaatacacatcatcggatatgattcctccgagcagcttgcggatactcttcctgtatttcgggatcatccacattccgctcaccttctgggacagcaggatctgcagattatccatcgccgaaagctcctgaaacaaagaagcagtgccgggattcccctgcacgacaccgatacggtcccgcatccctgtcatcattttcccgaccgctttctcacagccgccgatacagagccgtccggacactgcctctgtctctcctctcaaaaatccggtcacttcgttataacttcgctcgtctatgcagaaaagtttgacgatctctcccttcgcaacagaaaaagatacatttctaagataacttgttgtgacgtcctgtatgcttatgccttcaccggcgcgctcttttggtccccgcttccagtcctctgcattcttctccagctcatcgcggtataaaatagtgtggagcgtcgtgtaatcacattcatccacatctttcaccgcgcacgtcttgccgtgctttacgacaacaactgtgtctgtatagacgaaattgatatcctccagcggttcgacaacgagacatgacagtccctttcttcggagcttctcaagcaggcaccacagctttttcatctcggcgtcactcaggcatatgctgagggctgtcagaataatgatcttctgtccgagcagatacgccttcatgatctctatctgtaccttctcaaatacagtgcgccgccccatcggcttttccatgtcgatgcaaagcccgaattcccggaacagttctgccgcctcttttctgtaactgcgtctgttgacccagtgctcttttacccgggggcgcacgagaaacatattttcctccatagacacagaatcgataagacggctctcccttgatatgagcgccacccgctttctgagcacacttgacatgtctttttccggtaccttttcttcctcgtagtacactctcccgtaatccgctttccgggcgcctgtcataagctcaagaaacatcgtcttctcctggatattgtcaaacacacagtggatgatctcaccttcaaacacctgcagttctattcgtttgagaagggtgccctttcttatattttcaattctcagccgttctttcttcatattcatcacgcctcagtctgggcagcattatttttacatcggtaccgattcccgcgacactgtacacatgcaccccgtagtcttcgccaaacaacagctttatcctgctgttgacattcttcattgcgatgccgccctttttcttccggtcctctcccacatagctgaccgccactttctcaaagtaaccgtttatcttttccacctgctcctccggcataccgacgccattgtcggagacggtgatcatcagcttttgttccgtcgtgtctatcttcacccgcacgacgccgccgtttactttcttttccagaccgtggtagatggcattttcaacaaagggctggatcgtcagcttcggcagccggagctggagcacttcttcctcctttggatatgtgatctgaagctttaatttctccccaaacctgtaatgctggatcgtaaaataattctctacattgtcgatctcctcctccagtgtcacaagcttgtccactcctgtgatggaataccggaaaaagatagacagcgcttctgtcgtctcagccacactgtcaagccctgcgcagatggcgtcgccccggatagcctccagcgtattatacaggaagtgggggttgatctgattctgcagagccaggtattccgcctgttttttggacatttttatggcgtcctgcttgttcagcagatgccgcacctttttcatcacatcattccactggggcatcagctcatactcagcatcaaacagctcctcatatacctggccgtcaataaatctctgatacagccgccgcatttcctgatacggcttcagcagatactccgccgtcagatagaccgacacgagcagtaccgtgacctcggccaggaggacggcgcacatgaatccggcagaaacggtcccttcagaaaatatgatacttaatatcccgatattgacaacgcctgacagcagcaatatagctataactgccgctgttctggcagaaagcgcttttcttttcatcctctgcctccttctaattgtacagtcggcggaattctgtcggcgtcactcccgtctgcttcttaaacagtctcgaaaaatatttgatgtccgaatatccgactgcaaaggaaatgtcctccacctgctgctctgtgttcaaaagcatattttttgcattttcgatccggatctctttcagataatccgaaaaatttttccctgtctcttttttgaacataccggaaaaataggtgggattaaatccgatctccctgcttacggtctcaagtgtgagcggaagataataattctctccgataaactgccttgcaagccggatcggcctggattccacatactttttctcctcgatccagtgcatgagagagtgcaccatataccgcttcagatagccggccgcctcatgtatcgtgccgagcacctccagatgctttaataactccggatactggtccggtatctcaatattataattgtgcgttccaaaataaaacaacgtcagcacttccttgtacacacttgcaacaagacgtccgtccttcgcagggctttcagaaagctttcgttccagatcgtccatctcaccgccaatgccgtccagatcaatgatctcgatatagttcaaaaaccgctttttaaacccattgtccacgatcctgccggcttcttccctgtagtcctccccctggggagctttcagcaggaaatcctcaccgtaataaaatctctgctgtatagactgcccggctgtctcaaagctctccagtatctcccggatactcccggtctcccggccgagtccgatatacacctgcacttcctcgaacacatcctgtagtcttaagatatccagcttcactttcttcagtttgcgcgtgatcctgtgcatttcctcctcagtcccgttgagtatgccgtatatatcaccgtcgaccactcccgttaccgcctcgttgcacataccgtccaatgcgcactttacgatctccgtgcctttctggagaagaatccttctcgtatccgaatcctctttgcgcttcccgggaatggccttaataataaaggtctgataacatacatcctcaaaatgataatggtattctccgtttatccgttccagagaataaaagcctccaaacttttccggccgcttcagcaggtcctcgagaaagcttcccttcagccgttcctcattttcctccagccgtttctgcatatcctcccacttctgcgcgtcaagtatctcctcccggcatttctcgattattttctcaagcgttgccgtcagatcttttttacggattggtttcagcagataatcctccactccaaagcggatcgcgttctgcgcataatcaaactggctgtatccgcttataatgacaatatacatgtccggatagagcaccttcgccttctggatcagctccatgccgtcacacccgggcatacggatatctgtgatcatgacattgactgtattgtcctgcagaaacttatatgcggagattccgtcattcaccacaccgacaatctcaaatccgaacgatttccactccaccagattgacgatcagctggcaaaccttcttctcatcatccgcgatcagtaccttcagcatactccgcaccctctctttcgtatcgtctaaaattcattctattatatcataatgttcagacaatttaaatggggtaaaatggggacggggattttttcaaaaatccccgtccccatttcgttttagggtgtccctatctgacatacattcactatccccacacttcaaaaaagaacccggcagtctgccgggttctcgtacgctgaactatttttaccagagcggtatctaccgcgcattatcatattctacaaatgcgtcaacttttggctgtgaggaacagccaggcacaaagtcgtttgtaaggaacgcatctgtcaattcttctctcagcttattgccaatggtgaacgcgcccatgcaggcgatgttggcatcgttgctcaagcgtgctcttttagcggaatatacgtcagaaagcagggctgcatatgcgcctttgactttattagccgcaatggacacaccgatgcctgtcccgcagatcagaatgcctctgtcatactcttttgaagccacagcctctgctacttttactgctgtgttggcatatatcggatcttcgcttccaaaatctgtaatttctccatagcccttttcttccatgaatttgatcaattcttcttttgcctcctgtgcatttgggtcacagccgattgcaatcttcatcttaattccctcctgaatacgatatgattatttttgattctagggatattctagcattgtggccgggctttgtctactttcggttgctttcgcattaaaatttaacggcccagggggcagccggaaagaggctgcagtcacctgctccctgaaatttattgggaacctgcggtgcgcaatacttccaaaagcagtctgcacagcaccccgagccgttccgtatacagagtttccttcgtcgtatgtatattttccagatctgctcccagcactattacctccatatccggatttttctgtttaaaataaccgcattcaagtcctgcatgtatcttctccaatgtaagttcttcattattttgcgcctggtatatttcacacactctccggatcagtttaccgtctcgttttgagtcaaatcccggttctttggatacgcactttacatccagccggcagcgcgctgcctgttgttttatccccgtatagagcaggtccagatattctttccggcttcctcttgccataatggaaagctccacgcatatccctgtggatatcgttccgatgttggaggagagatgtatatatccgctgctccccggctctgtcttaaccactccgtttggaatgctctgaacaaagtccagtatctcctttgcgcactgacgttccagcacccggtccggcttttcggacttctcaaccgtcagcacaacatcctcaccctccgcttccataaatgcaaacatctgcttttttacggaagacagcgtttccaggaattcgtttgtgcagtctgatttaatacagacggtgcctgtgcacgaatcgggtatgacatttttcgctgttccccctgtgatatgtgccagttcaaaatctatccccagcaatcgtatattctgcagtatcttaatcatttcacggactgcgttagtctttacccgatgtatgtcaaggccggaatgtcctcccggcagtccctttagacatatccggtaggcagagtcatactcgggccgcttatacaccgcttcctttcttgccaggagactaaggctggacgcgcagccgatgcagctggttcttgtggaggtccagtcaagtcctatgaaatacttatcctgcacaaaggatgggtcgagacttcttgccccgcccatcccctcttcctcctccacagtgaagattcctcttaccggcccgcaggcctcttcccctctcagtatttccagaatgagagcggccccgattccattgtccgcgccaagcgtagtcccttctgccgttatccgtccctcctcttccaccagctgtatgccgtccttaagaggatcatagacacggccgggagtccctttgcataccatatcaatatgcgcctgaagggtcactcttggcacatgctcatagcctgcgtgggccggcttgtcaatcacaacattatttttagaatcacgtactgtcttacagccatattttattccaagcttctcgatatattccgctgccctctgctcatggaaggtcgcccttggaattaaggcaagcgcgcgaaactgccggatcacttcttctaccatctcttatctccctgtaagcgcacgggcaagttctttgaactcttcatctgttacctctccgttatggaacaattccctgccgtctatgattagcgttgcgccaagagccacacagtcagaatgtgacggtcccggcacgccgtccggaggaacgagatttccccctatgctgccgaacgcccatgtaacagatccccacactctctgatcctgcaggatatccccggataaaagcgcccccggattgatgccgatacccgtgtgggagattccaaacatctgaggatgctcaaagctcttaagccattttaaatatgcctccgcctctttgccgcctgccacttcctttacccttccatccacgaccttgattcttaccggctctgaaggtacgccgcataccggagccagcgccccgtcaaatacgagagttccgtttacactttcgataagaggagtccacgctatctgccccggaagcatacttgtcccgggatttcccgcatcacccagctccttcagcaccggcctgccctgtatattctcaaaagagatatccattcctttttctgttgtcatccgcatacaccgtgcattttgaatcttttccgccagcttaaggccaaatgcctgaagcgcgtcgtattgtatattcccgatacaatgcgcgagaagctctcctgtcgctccggtcagacacatatgtctgagcgacgtattctttttcatgatctcactgtacgcgccggagccatatatccacatcttattgtattctgcccatgcgtctgccttcaaaagcagcgataccaccgccttacccggtatctccttatctgccgccacagccacaccgccgggcgcttttatccagagcgtcgcccactgtataccaagtctgcctgccgcctcctcagttgcctccaccacttcccggtccgtgagggtatccgctgtaataacaagcagttccccctgtttcatccgatatagatccctcaataacttctgtgcgatctgaatcagttcattcttcataaaataacacctccttgatctgttttatctagttctgagcagtatccgcatgatccgcctgacaatacttgtgacagcacacataatgtcctccgcttacctccatcatctcaggaagttcttttgaacagatatccatcttcaccggacaccgcatatggaatgcgcatccgggcggaacatttaccggacttggaatctctccttttgatatcaccttctcaggccgcatcatctcttcttcatctgtcgcgaccggtatggaagaaagcagcatctgtgtgtatggatggagcggcttctcaaagaaatccgccgccggagccagctcgcacacctttcccagatataggatcgccaccctgtccgctatattgcgcatcaggctcagatcatgggtaatgaacaaatacgacagatttctctccttttgaagttcgatcagcttacggatcaccttcgcctgcaccgacacatccagcgcactcgtaggttcatccaggatcagcagagagggatccgccgccatcgctcttgccacagacgccagctgtctctccccgccgccgatagagcgcggatagttctcaccgaattctctcggaagtccgaccatttccagcagatcttccgccttctcctccagttcctttccttctatccctccgtgaagctttaatgtaaattcaatacttttcttaacttttctccggggattcaatgccgaacttggatcctggaacacgatctgaatatttcctttctgctcttttgtccgcttcatccctctggctgtcagatcttcacctctatatatgatactgccgtccgtcgccttgtacatacctactaccatataagcgatcgtactcttaccggagccggactcgcctacaagcccaagcgtctcaccttcatatatctcaaggtccactccgtccaccgcccgcactacctttccattcttaagcggaaaatattttttcaggttttttacctctatcgtctttttcttttcttccatatgcgcttacctcctgagcatgaaacatgccgtctggtgtccttcctctacctccgtcatctccggtacagtgttcctgcactcgtctgtcgcatatttacagcggggcgagaatctgcagccgtccggcggattcagataatcaggtatgcgcccctcgattccgcttgatattccgtctccggtcaatttggggacacattccatcagcgcctttgtatacggatgctttggatcgtggaataccgctttggtcctgccatgttctacgatcattcctgcatacatgatatagacatattctgtcacttcgcggataactcctatagaatgggataccattaccatggaaagtccctttttctccacaagtgaattcatcaggcgcagtatctggtcctggatggtcacatcaagcgcagttcccggctcatctgccagcagcagcttcttgtccgccgccagggaagccgctatacagactctctgtctcataccgccggacagctggaacggataactcttcataatgcgctctgcgtccggaagtgatacttcataaagcgcctgcactaccttatcatacacctcttttctgctcactttatcttcaaaagagtatctaagtcctgtcaccagctgtttctcaattgtaaatacaggatttaaggcggccgacggatcctggaatatcattccggcgccccttctgtgaaacaggtcggtctccgctcctgacatctcccggacatcttttccgtcgaaacgtatttccccgtcttccaccactcctgccgatgggagaatgccaagtatggccttaaggcttgtcgttttcccgcagccggattctcctacaagcccgactcttcctcctgaaggcacgtcgatacagatcccgtttacaaccttgctcctgccgccgtatactttatatgaaactttcaaattacgtaccgataatatatttttcttctccatcaggcttcctccactgtaaacaacgcactcacgccatccccgatcagattgaatcccaacacgatgataataatgaaaaccgcgggaaatatagtgacccaccactgtcccggaatgtatttgataccgtctgcgatcatatttccaagtgacggcgcgggaggctgttcgccaagtccgacaaacccgagcgtagcgcccatcataataacgagccccatatccaccgtcatcttagtcagtaccggcgaaatgcagtttggaaggatttcttttgtcaggatatgcagtgcgcctcctcctgtcagctccgcatagatcacataattttccgctctgagggacgatgatatactgtaggacagcctggcataccacggccaccacatgatggttatagctatcatggcattcgtcagattcggcctcagcacagatgcgatggccagcgccagtacaagcggcggtatagacaggaagatatctgtcacccgcatgatgatcacttcaacaaaggttcctttcatgtatccggccaccactccaaggataaatcccaccggtaccgatatgacgaggacaagaatccccataagaagcgcgctccttaaggatatcagcagtctgctgaacacatctcttcccatattgtccgtcccaaacaagtgctgtgcgcacggtccgatattggcgtcggcaaagttgacatatgctccgtcatgatctggatacggcgcgatctgctttgcaaatacggctgccagtatgacaacggcgactataataatacccacaacggcgggtatattcttggacagctggtaccagactctttttacactttcaagcttgctttctttcatgctatcacctctttctacgccgatgttctctgctgcatccgcggatccagccatgccacgatcaagtctaccagtacattaacaagaataaataccagtccgaatacgagcaccaccgcgcagactgaattcaggtctttttgcagcatggcgttgatcccgtagcttgacaggccgttccagttaaagatctgttccacaagaaacgcatttccaaaaagcgatgcaaagtcaagtcccataatagcaacagtcggtataatagacggcttgagcaggaaccttgcgttgatgatccttttcggcacgccctgtgtcaccgccatggcgatatagtccttccccttgttgtctatcatgctggcccgcgtcatcttagcttcctgcatcatacatccgatagacagcgaaagcgccgggagtatgatatggcctgccgcatctgcaaatgccgccggatttcccgccagaagagtgtcgatgagcataaagttcgtaatcaccgggacgtcaaagcccgcgctcagacgtccgccgatggatggcaggatcgggatccagtatccgaagatgagaagaccaaatactgccatgacaaatgccggggtggcgactcctatgtagccgatgatcttgatgaggatgtcaggccaccggttgtggaaggccgcgcagatcaccccgatcacctgccccagaataatctgaagcaggccggcaagaagaacaagctccagcgtggcgggcagaaattctttcaagtcctgggtgaccggccgtcttgtcacaagcgactctcccagatctccgcttacaagatccttaagccagtatccatactggaccggcagagcttcgttataatgcatctcctcccggtacgctgccaccgtctcttctgaagccttcggcccaagagctacacgggcaggatcaccgggaacaatgcgcagaatacagaaaatgatgatggaaagacccaggagcacaaatattgaccagagtaatctttttataattgtttttgccataacatacagctcctttacaatactgactatttgtccacaaagtgcatccctttcaggctatactgatatcccattacaggtacaacgctttcccccttcttggcccgttctgccgcttcccagtaaaggtagctgctctgatatgcgtgcgtctcaacgagttcaaagagaggaaccgttgcataatcttccatgattatcttctgtgcttcctcatatttcttcagcctttcttctctgtcgatcgtagatatggcgtcattgataagagcatccgccttctcattgctgtaccagtccatactctcccagctgcccacctcttttgtaagataggaggcaaccagctgtgaaccggcctcagagtagcttggcgtcgtcagtatcgtaccactgttcggcgactgttccggtgatgccgcactctctaccagtgtaagccacggcaccttctctacattcacatccagtccgatcttggccgcgtccgactgtatgagcagcgccagcttctcccggtctggcgtctcagctacccagtaaatcgtataatcgagatcgtctagctcatcataatattttgattgctttaattcctcttctgccttcttgatatcataatcataagtcagcttctcatcgagagaacctgccagcacacgggtgaccggtccgtccgccacctctgaccccgggaatatagattccaccatattggccctgtcggcaagataagccatggccttgcggaaatggatgtcgtctgtcggcgctttcttattattcatcgtaagatacatcatgcttccgccaaagaatttcatcagttctatcccgtccatcttctccatctcagcgtaggattccatcggctggaatgcatctgtgatctccacttcctgccttgacatcatcgtcctgaccgtcacagattccggagaaaccatgaatttaaatccttccgggcttccctcctcaaatgtctcaaaatagtccttgaacttcacaccggatacatggtcccccgacgcatattccgtcacctggtacgggccgcttccggcgtcgtgttcattcaggtaagccttgccgtaatccttatactccccatagcttccgtctttcagatgatccattacatccttctcgctcacgatataaagtcttacaagcgtggagagaaatgggccaaaaggttcggacagtgtaaactgcacctgtgtatcatctaatgccttcgcctcttttaccttatcctggaagagatatgcaaatccctcgccgatcgtaatcagacggttcatggaaaataccacgtcagacgccttcaccggttccccgttgtgaaacttagcatcatctcttagatgaaatacccacgtaaggccgtcatccgacacggtccagtccgacgccagagacgcttctgtatctccgtcatgggtcgggactacgagcgagtcataaatattcggaaatattgccgtagacacctcgtctgaaccgactgcaggatccagatacggcgtattggtgaacatcatacgtacgatcttatccgggttcgcagatgcactgttctttgtcttatctgaactgttctttcctccagaacaggcgccaagcattgttacacacatggtaagtatcaataaaaagcttattttctttttcatagtcttcctcctttcgattccaactttttccattttcatttattttacattcattgcaatcattaaataattatgttataacgtatatactatccattttatatcctaattcataaaccaaacatgtaatcgaggtgttaagattggaaatacaagtatcagactgcctggctgtctctgcgctgaaacacgcctctgtagccgcgggaagcaaaggtcttggccggaccgtctctgctatctccgtactggagacaacagatgtggacgatatagaaccttcttttttaacgagtggtgaacttcttatctccactcttacttctatacgctatgataccggcaagcagtgcgcccttttgtatgaactggacaaggcggatacttctggtcttatcttattttatgttgggaagattctgcccgggcttgatgcagactttttaagaatcgccgatgagctggcctacccgataattaccatctccccggaggggcctgcgctttttaccgatgtcattcacgacattgccaattacatctttcagagaactctaaatgacgaactatccctgcccgaacttctgatcgactttaatgcctccgacagccaatatggtgatctggggctgctatttaacgagatcggccgctgttacagggggctgatgatactgctcgatgacaaataccgccttatgtgctgtacgctcagcagctttctcacagataccggcctgtcaaatgaaacgctcgtacacaatatcatgcactggtaccgcagcctgtactttggtaaacatcctgcttcatccataatgacagaccaatatagacacgataccggtacgatatttaccgtcaacagctgccagatcccgcttaaggacacctcctgccggctgctgttcgtcacagagcgggaagatatctcctatcttttcatgaacatgctcacacagaccatccgcagttatatattaaaacgcgaagattcttttcatgcctccagggaagacgacctgcttagcgctctgtttaccagcaattacgaatattgtgactatctggcttcaaaactcaacatctcgctggaacagatatcgtccatgtgggtcatctgccctggcgcagatgataatgcatacccggatctgctgctttcccagcgcacgaagacaattctctcctattgcctgaaagcagtggcagatatgataagaccggtgcattatggtttttatcagggggcctggattcttctttttgataaagcgcttccttcctctgatctttcgtatgctgcctcgcttttcttaaaagaactgaacatgtgctttaccggaagccctctctttctctatgaccggctttcttcctataaaagaattgccgcggcctatcagctcattgacaatatacgggatattgcctgcaaggtgtatccgtatgccgaatactatacgctgtcgcacatcttctttctggatacgtgccagtcctgcctgaatcatatggcggactctgattttccgtcctggccgctggtgcttgaacctctcggggatgacgaatctctcatatccatactggagaccatgattctggacacacagatggatgtaaagaaaagcgccgagcttctctacctgcaccgcaacacgatctactaccggctgaaaaagatccagtccatactcggctatgatccgttctcggctccgggtatcagcaatatatccatttctcttgccctgcgtcggttactgcagccgtagggtgcagactatttcccaagcttttcagccagtttgttaagctccggatcgatgaccttgcctttatctgtgatctgtactccgtcgagccatacagatgtgttcagtgtaatgccgtctgtatgtgacggcgccggtacaccgtccggcggcgcaaggaagcttccgatggcaccgaagccccactgggtacagccccacactctttcgtcttccccgttctggccgctgatttttgctcccggatggaagccatagcatacgtgcgcaggacgcagcatctgcggatggttaaagcttcttaagttatcctcccactcttttcctgctcttcctccgtcaacctttacgatgacgcctttttcaatatacaccttcaccggcgccgtcagcacgccgatctgcgggacgagagacgcgtcaaatacaagcacaccgttaatgctgtcaagaagcggagtccaggcgatctggccgctcaacatcgtcgttcccggcttatcccaataacccgtctcaccgcggaccggccagtccggattattgtcaaattcaatatcctgtcccagctcagatgtcatacggatatgctttgccttctttgtcttctccgccaccagctcaacaaagtctctcaatgcccgctggtctactcttccgtacagacggacaaatacatccgtcgtcgttcccggaagcgccagatatctcagtttcggattcccctgcaccgccctttcatacgttttggaatagagaaaatattcccggttgaactcaagccatgcatccgctttcaacaacgcccccagtatggactccgaaggcagaaatccgtccaccatctgtcctggtccaagaggagaggctgtccagatgaccataggtttaccgcccaccgcgaaagcagccttggcaacctccgtcacaagacgcagatcactctccgtatcagccgtcagcacaagcgtctcgccttccttcagcttacacgtctccctgatcaagacctccgcagccttacttaattcgatttcgtacatacgtgacatacaatacacctccatttttaaacatctgctggttaccggcaaaacgcagcctgctgcccgtatacaaaaacatccgggtaaaaaaatggctattgcaaacttatttttgcaatagccccgctgctttttgttaaacaaaggatatcattatgtcatagctttcacaatataccccattacaaatatctgcctacttatttgtaatatagtacaaatctgtatttaatatattattatagcaaattataaaataatttaaaaatatcgttttaattattcatataatttcatctttacattaacccgctctgaaccataccactattgccacaccagtcaaagataaccccacagggactgcctggcaaagtgaggcgtaatggactatgctgcgccctaaaacgggcggttacagacacttacgaaaaaaagtgctataacataggttgagtgcggcattataaataccgcccgctccctataccaaagcacttttttccgtcagcgtctgtccgcaggtatcctggcaccgcatggctcattatactccgctttgcgtccgcttcctcccccgtctacactttcaaagatattactcctcaacgtttggatgcaggatcaccttcaatgtccccggcccgccttttgcggccagcgcgatgcctttgtcgtaatcgtcaaggggcatctcgtgtgtcacaaggtccttcacctgcactttgcccgactccagatattccagcgcccgcccaaagcagtgtgtctgcgcccacgtcggaatgagctgtatctcgtgaagataccaatactccgggtcaatggcccatttcgcgccggcatgcggcatggcgaacatcataaacttggctcccatcttgccgaacttgatcatactctccatgacatctacatttgccgtcgtatctacgagcacgtcaaatcccttcggagcgatctccctgagctttgcctcatgcacgctcgggtcgtttctgtccatgaggatcgtttctttgcatccgtactttttcaatatatccagcttatcctggctcggtccgcagactactacccggtttgcattggaatgcatcagcagctggatcagaatgatccctgtaggcccgcatccgtacacgagcacgtcatccccgaactgaacctggacacggtccatggaatgtacggcacatgccgtaggctcagcaaatatcgcctcattaaaggacaggttgtcactgatcgggaatactttgtccgcattgacaacgacatactccgcaaagcctcccgggccgttgcatccaagtgagtagaagttctcacagtagagcggctcgtctttcctgcagtaatagcagtcatcgcacagcactgtattatcggccgtcacacggtctcctaccttaaacgtcttgacgtcacttcctaccttgcatacatatcccgcaaattcatgtccgttaagcagcgggaactctgccagaaatcctccgcctgccagcgcaacgtcggcgcctttgcatattccgcaggacatcacttttatgagcacctggtgaggcgctgtctccggaaccggcacttccgtgatctcacagtggccgggcctgtcgtacacatttgctttcatcatttccatattggacacctactttctatttttcagagcaattgcttcttttgcttttgcagctaacttctccggcgtcaggccgtatttcaccatgagcgcctccgcagttccggaatgtccgaacacgtcttccacaccgtgttttacgaccggtaccgggcacgtttctcctatgacttccgacaccgccgcgccgagcccgccaatgatattgtgctcttctgtcgtcacgatcgcgccggtctcttttgcagcctttacaatgatctctttatctatcggcttgatcgtgtgaaggtcaatgactctcgcctctatcccttcctttttcagaagcgcagccgctttcagcgcttcctgcaccataaggcctgtggcaatgaccgtcacgtcaccgccgtcttttaactggaccccttttccgagttcaaacttatagctgtccgcactgtctgtcacacactccacgccggagcgtccgagccgcagataacacggcccgttataacctatcattgcctttacggcttcccgcgtctcgtttgcatcacttggacagataactgtcatccccgggatcgtgcgcatgagactcaggtcctcgatacactggtgtgtcgctccgtcctcaccaaccgacaagcctgcatgtgtacctacaactttaacgttcagccccgggtatgcgatagaattccttacctggtcatagatccttcccgccgcaaacatggcaaatgtatggcagaacgctgtctttccggatgccgcggcgccggcagccataccggccatgttgcactccgcgatgcccgcgttaaagaaacgttccggatacttctcggcaaaatagcaggacatcgtacagatcgtaaggtctgcgtcaaataccattatcttctcgtcagccccgaattcacacagagctctcccataagcttctctcgttgatactacatttcccatgattacacctccagtgatgcgataactgcatctatctcactaaatgcctgactgaactgttcttctgtcggggtgctgccgtggaattttacattgttttccataaatgacacaccttttccttttactgtctttgcgacaaccaccgtcggcctgccttttacatccgccgcctcgtcgaccgcgcgcgcaatctgcccgtggtcatgaccgtcaatggtgatcacattccacttaaatgcccggaatttatcctcgatcgggtaaggagacatcacttcttccaccgtaccgtcgatctgcaggttattgttatccacaaacacagtcagattgtcaagtccgtaatttcctgccgccatggcagcttcccaaacttgcccttcctggatctcaccgtcgcccagcgcagcaaatatgcggtaatcttttttgtccaccttgccgcaaagcgccattccgacagcagcagataacccctggccgagggaacctgccgacatatccacgcccggaactttcgtcatctccacatggccggagagataactgtccacgttccgaaatgtcataaggtcatccaccgggaaatatcctcttagcgccagcgtcgcgtacatcgtcggcgtacagtgtcctttggataacacgaacctgtcacggtccggattcttcgggtctgatggctcaatatgcatcttctcaaagtataaaactgccagtatgtctgccactgaaaaagaaccgcctacatgtccggagtgggccgcctcgattgcctcgagcgcctttctccttatctttgccgctgtcaatgccagttctttcactctcttttcttccatcttaagaacctccgtctgattaagtcatttacctttagcagattgtaaatccaccgtcaattaccagattcgccccattgatgaggcttgccgcatcacttgccaggaataccgcgcacgccgccacttcttcgggatacccgaagcggtgggccggtatcttctttttgaattcctctccccgctcattgttccagttttcttcgcccataggagtgaggatgatcgtcggcgagatggcgttgacattgatattgtattgggccatttccattgcaaactgttttgtggcatagatgaccgccgccttggcgcagccgtatgtaagatgtccttccagcgcaacgacgcctgcctgtgatcccatattgatgatctttccgccgccgttttctttcatcactttcgcggcagccttcataaaccgcaccgtacccgtcaggttgatgccaatcgttttatcccagagcgcttcgtcgtgctcaagcacgccttctaccactccgatccccgcacagttcacaagaatatcaagcgaaccgaacctttccaccgtctgagccacacacgcttcgatcgcctctgtctctgtaatattgccggcatatgccatataaccggcaccgtgctgttccatgtacgccggaagctctgccggttcgctcaagtcaaagctcaccacattggcgccctttctcgcatacattctggcgatctcaaaaccaataccgcttgcagccccggtgactatagctgtctttcctttaaggctgaagtcttcattaaaatttctgtaatccatctcttatcatcctccatggtcgtttcctgtcacttatttaatcttgatcactgctttcacaacctcgtctttgttgttgatcgcacagtcaaacgcttcctggatatcatcaaaatcaaactcatgtgtcacaatgccggacacgtcgatcatgccgtccgcgatcgcagcgattgcctgcggatatatatttctgtaccggaatacagactcgatctttgcctctttcgccatgatcttggcaaagttatattctatcttctcctgcgcggaaatgcctacgagaacgatagttccgccgttcttcaccatgtacggcgtctgctggatcgtgaccggtgaacctgccgtctcaaatactttgtctactccggcgccgtctgtgagcttatccatttcctctaccgcattcacttcttttccgttaatgacacgggtcgcgccgagcttcatggcatagtcgagacgctttggaatcacgtccacaactgtgatatccgtggcgccgtgggccttgcacgcaagcagcgtcacaagtccgatgcatcctgcgccgaggatcaccacagagtcgccgagtttaacgtctccctggttggccgcatgcattcctactgaaagcggttccacgagcgcgccctcttttgtgctgatgttttccggaagcttgaagcacatgttttccggaaatgcgatatagttctcatagcagccctgtaccggaggcgttgccagaaactgtacgtccgggcagagattgtagcgtcccgtcttacagaattcacactgtccgcacgtaatgcccggttcaagcgccaccttgtcacctactttaagattctcaacgccttctcccagttcaactaccgtaccggcacactcatgcccgagcatgaagtcgccctctactttgtaatctccgcaccttccgtcatggaagtaatgtacgtcggacccgcagatccccacatactcaagttcaacgagcacttcttttgcgcccgccttcggcatctcgatgtcgcgaatctccattttgtccaaatctgtcatataagccgctctgtttttcataccaaatcacctgtcccttcctggatcgttaaatatttctcgatttttttaaggttaaataaaatgtcccgcatgcgagacagcgcacctttttgtataaaaactggcaagccataagacctgccagttttttacttttacaatatacttttatttactgacattctattattctttaatctgtccgttgtctttgtacatctggatatattcgtcaacattgtcttttgtgatcaatggtgccggaacattgtcgttgatgtcagtaattttcttgtcgcctgtcagaacagagtgaattgcctctgcgttcatttttgccaggtcgattgctgactgtaaacctgtagatgtcattttgccttctttgatcaacagacaagcttctgctgttccgtcaacgccgtatgccagcatatctttaaatttgtcattatcttttactacttcgatcgcgcctgccgccatgttgtcattcatagatacaactgcgtcgatgtcgccgtaagcctgtacccagtcttccatgagtgacatagcttcgtctttgttccagtttgcaatgtcttctgcaaggatctcaacgtctggtctcttctcgaagaattctttctcccatgcgtttcttctctctgtgctgtggaagttacctgcaggtcctaacagaacaacaacttttgcgttctcaggaatctggtcaactgcgagttcacagtttactttagcctgctcgtatggatcagcgtcgatggaacctgttccctcacactcaacacgtgggtttgttgtgatacatgggattcctgcgtcaactacctgctggatataaggaagctgagcctcgccgttgttagcctggatgatgattccgtcaaatccgctggagatggcgttctcgatcattgtgttttctttttcgtcgtttgcttcaccgtcaaatacttcaagtgtcatatcgtcatagttctcaaattcagccttcagctcatttgcaagccatgccgcgaatgaatcggactgagctcttgcgatataagcaaccttatagctgtcttttttgtcccctgaatccttcttgtcatcagaacttcctgagtctgatttgctgcatccgatcgccattgtggcaaccattgccgcgcagagtaatacacttataactttctttttcatagataatgtcctccttttttttgctttcatattgtaaaagttctgcacttaatgcattcattttaatgagagaagtcttattttgcttcctctttcttggcgtcatctgccacaaggataacttttctcgtcttcttgttcttggaacggatgtccagtacgaccgcaaatgcgatgatggcgcctttgactatctgctgtacgtaggaatccaccccggtcaggttcatgatattgttcaggaacccgatgataaacgcacctgcaagagtacccatcgtcgttcccacaccgcctgagaaactcgtaccgccgacgatcgtagccgtcagaccttccatctcgtaccctaccgcgccgtttggcagacccgcatttacacggctcatgaacagcacgccggcgattccggcaaacacaccgttgattatgtatgtgatgtacttattcttcttaacattgataccggatgcgatggcagctccttcgttgccgccgatggcatacagcgaacggccgtaccttgtgtggttcatgatataccaggtgatgatcgtgatcacgaccatgaatataataggcatcggtatcggccctacgcttccctgtccgaatacggtaaagtctttcagctgaagcaggttctgtccctttgtatagagaagcgccgcgcctctcgccatggtctgcatcgccagtgtggcaatgaaggccggaacatcaaaatgtgttacaagcaccgcgttcacaaggttacacagaacaccgactacaacggccagcagaagcgccagcaaaagagaaccggtagactggtaacaggcgatcgacagcacgcctgcaagcgccagcacggaacctacggacaagtcgatcagtcccgcgataacgaggagcatttctccgtatgctatgatcgttcctaccgacagctggcgggcaacatttgtcaggttgtttacggacaagaaattctcattcagcaccgcacataatataaacattgccagcaacacaataaaaatagaatatttttctacaaacttactgtttttgaatttacttttattcattttcctatacctccgctttttctgtgcctgtcgcaaatctcataatagtttcctgtgagaactcgtctctgttcaggcatcctgtgatcattcctttgttcatgacatagattctgtcgcacattccgatcagttcaggcagttctgacgaaaccatgatgaccgtcttcccttctttgacaagttcagtcatcagtctgtatatctcaaacttagcgccaacatcgatacctcttgtcggctcatccaggatcaatacatccggatcccggagcatccattttgcaagaaggactttctgctggttaccgccgctaagcgcctgtatggcagtctctaacgaaggtgtcttgacgttcatcttgtcgaaatattccccgacgagctttttctcttctcttggatggcttctgcctccgtagatgaatttgtcaagactggaaatactcgcattctccataacgcttcttataggtacgattccgtagcgtcttctgtcttctgacagcatgactactttattgttgatactgtctcttactttcttgatatgtaccggcttgccgtgcaccttgatctctccgccgtcgtacgggtccaggccgaagatcgcgcgcatggtctcggtccgtcccgctcccatgagtcccgcgaatccaacgatctcccccttctttgcatagaagttgatatctttgaatacccctctgctctccagatccttgatctcaagtatcggctcgccgacaggtacttcttccttcgggtatacattttccatcttccgtcctaccatcagggcaatgaccgtatccaggtcaagctcggaagccgggtgtgtctcgaccaccgtaccgtcacgcagcaccgtgatatcgtccgcgatgcggaacacttcttccatcttgtgggatatgtagataatgcttacgccgcggctcttcagttccgcgatcttctcaaacagtacctctacctctctgtttgtgatcgccgatgtcggctcatccatgataacaatatctgcgttgttcgagatcgccttgatgatctcaagcatctgaatgtcagatacagtgagcgtcttgagcttctgttccgggtcatagggcagcttctcctgctccaggaacctcagcgtctccttgcggacctttctccagtctatttttccgatcttatttaccggcagccttccgagaaacagattctcttcgatcgacatctcaggaacgtaattcagctcctgggcgatcatggcgatcccatagctttgtgcctggatagggtttttgatctccaccggcttctcgtcaatgaatatctgtcctgagtccggcttgtaaagtccgttgataattttcatcagagtcgactttcctgcgccgttctcgccgcaaagggcatgtactgtccctttcctgactgcaaaatcgatgttgtccaaagctttaactcccgggaaagacttattaattccgctgacacgcattttaatattctccactcttctttcctccctttcatatactgcacagcttttaccaaatttttgcaagttttacatatttgttttattactgtttatgaccgtttttgtttgagcttaaaatgagcccagcatttttaacgattctatgacaaatattttgcatttattatgcattttgcttattataggacaaattataatattatgacccttgtttgtcaagtcacttttttgtcctttgacagtcacttttttatgatttttgttaaaatagacacctttcgttacatatttgttcatatttagttcataatgtcaaccgccatacatttgttcttttttacttttttattgttttttattgttttctttttgtttttgtgttatcttatgcttaatttcttaccttctattgaacatcaccagttcaacaggtatttattaaatgtacatagaaaggagtatgttatgattcacacccttacgctgaaccccgccattgacaggatcctctacttgaaagagctggaaaagaatgtcacaaacagagtcagaaagacgacagacaccatcggcggcaaaggcacacacgtatccatcaacctgaagcttctggggcaggacaataacgcattcggcatatgccacggcgaaaacggcagacaggtcatccagatgctctctgatcacggaattgacgtccgcttcaaccattatatggaagaaggcaaggagacacggaccaactatttgctcatcgaggacagtaccgactgcaccatcgtggcagaatccggcgtcacactttcggagagagaacttgacgaacttctggcgaccatgaaggaagtgatccggccgggagattaccttatcttctccggggacgcgtccaattcccccgatccttccatatataacaagatcctgcacactttccgggaacgggatctgaagtttttcctggacacaagcggcgcttccttaaaggaatgcattcaggagtccccttatatgatcaaaccgaatctggatgagctctccacgctggccggctacgacatccccgaagatgacgcttccatcatccgggccatcgattcccttgacaaatacggtgtggagatcaccgccgtatcactgggcggggacggctccatcgtcaaaacaccggaaggcgtattccgcgtgcatccgccccaggtaaaggtcgtaaacacgatcggatgcggcgactgctatctggcgggcttcgtatacggcctttcccagggatatgacatggaagagactatacggaccgcgacaggagtctcggccgcaaccgcagagtcacagctgtctgccggctttgatacgagccgggccacagaacttaaaaaccaagtaacaattgaaaaaatccgctgattatattaaagtaaaggagtaaagtatgagcaatttatcttattatgaaatgagacaggaaatggtaaccgtagcacgattgatgtgggagcgcagacttacgaacgcagccggaggcaactttgccgtgcgtgtggatgacaaccgcattctcatgtccccgtcgcttatgtcggaagaaaagcactgtgatatgaaaccggaagattttcttctgatcgattatgaccagaacatactcgaaggagagggaaggctttcccgcgaaggactgatgcacgttctcattctgagcaactttaaggaaatagaatgcacgatacacgcccatccattctactgtatgccgttcgtagcccagtgcaaaccgatcccgaatgtgacggaagccaccatggggcgcggcgaagtcggctgcatcgaatggacaaaagcatactccgaagagctgagcagaaatgtgtaccagtattttgaagatcacagggaactggcggaaaagaaaccgatcggaatgatcatgccaaagcatggcgtcgttgtgtcaggcccgagcatctatctcgcttacagtatgctggagagaatcgaatgcgacgctttctgtaccattacaaagaacctcatctaaatcttaaataaggatggtatgaaatatgtacagccatgaaaggaaagccaaaatcatagacctgctgaaagcccagtcttccgtcagcgtcaatatactggccgatatgctccacacgtccaaggagaccatacggcgggatctgaaagaactggagagcgaaggccttctgacgagaacccacggcggggccataacaaacggcaattcccgctctgtcggagcatcggcaaagtacggagacacggtactcaacaacgagtatccctttgcgctccggcatgtgaggaatataccggagaaaaagatgatcgcccagagggcggccgcctttatcgagaaccgggacacgatctttatagacaacagctccaccaccttatttctcatggactatattccgagggaaatacatctgacgatcatcacaaactcgatcaaggtgctgctggaggctgccaagcttgaaaatcccaatctgtcactcatatcactggcagggttctacaactgtaataattattcggtctacggcacaaggacgatcaaaagcgcggaagatttcttcccgaacaagtcctttatttcctgtacaggcgtaacgcttgaaaaccggcttacagatatcagcctcaacgaggtagatacgaaaaaagcgttaatgtcgaagtcaaaagagacgtacctgctggccgaccacacaaagtttgagatcaacgggccgttctatctgtctgacttcgatgcgatcgactatatcgtaacggataaatatgactatacacctcagaccggcaataacatacgaacgatcacttccaagaataatataaagatcatcacaagctgagggaaggaggttccacattgaacatactggcttttgacctgggtgcaagcggaggaaagctctttcttgcgtccatcgacggcggcaaagcttccatagaaaatatacacaggtttgacaacgtatcctatcagatcaacgactgtctttactgggacatcatcaatatatataaagaaatgaacacagggatcaaaaaggcggtcgaactgaccggagacagcattgattcttttgccatcgattccttctccaacgactttgcatttatcgatgacaagggcgcactgctcacaccggtgcgctgttacagggataagcgcacgcagcgccacgccgaaaagatctacgggcgcctctccagggaggagctctaccggttaagcggcaaccagaacgcgctcttcaacacttacatgcagctcgccgccatgtgtgaggacgggcatggctacatattaaaaaacgcgtacaagatgctttttattccggacctgctcatcaatttcctgaccggaaagacaatatctgaatatacactttcctcggtcagccagctgtatgattttaaaaaggatgactggtgccaggaaatactcgacagctattccattccgcgcagcctgttcggcaccctgacaaaaccgggcactctgctcggacgcacacaggacagctacaataaatatatggagacgaaaggcttccccgtatctgtcgtgtgtgaacacgatacggcctcagcctacctctcctctccgctcacatcagactgtgccctcataagctgcggcacctgggcgctcatagggaccgagctggactcctgtgtcatcacaccggaaggctaccgggtgaacctggccaatgagggcggttatgagggccatcaccgcctgctccgcaacgtgatgagttcctggttcatccaggagacgaaacggtactataaagaacacggaaaagactattcctttgaagaactcggaagtctcgccgaagccgccgaaccgtttgcctacctctttgacccggacgaagacctgttctacgaaccgggcaacatgccggtaaagatccagcagttctgcatggaacactacggctcccggccggaatctacaggggagatcatccgctgcatctatgaaagtcttgcgatgaagtttcgctggacgatcgaacagctggagtgcatatccggcagatcacttcccgtcatcaatatgatggggggaggcgccaaggcgtccatgctctgccagttcactgccaacgcggccggccgcaaggtgatcgccggtccggatgaggcaaccgccataggcaacatcacagtgcagctcatctccacaggggccgcgcggacactggacgaggcaaaggggatcatgcgttcatcttatgagacaaaggaatatattccccgtgatacggaccagtggaacttaaagtacagggaatttttgaaactgttgaaataattcagtcccggtgtccggtccgggaagcatagaggagcaaatatgaaaaatatattagagtcaccaatcataaccgaaatctgtgatatgacagccaacatgtaccgtctcgggtgggatgagagaaacgggggcaatataagctggcttcttgacgaacaggaactcgcagaatacctggacctttcacaggtcatccgcaatattccgatagcgtttgacgccgcagagcttgccggacgtatttttctcgtaacaggtaccggaaaatacttcaaaaatgtgaccgggaacccgcaggagaatctcggtatcgtccgcgtggcttcaaacggcacagagctggaacttctctggggctttgaaggaggagcgcttcccacaagcgaattccccacccaccttatgaaccacatggcaagactgaaagcagacccggaacacaggatcgtgatgcactgccatcctgcaaacaccattgccatgacctttgtgcactccatagatgaccgcgaattcacttgcacgctctggcagatgatcacagaatgcatcgttgtatttcccgacggtgtgggcgtcgtgccatggatggtctccggcacaaacgatatcggagaagccacagcccggaagatcaaagactgccggctcgtcgtatgggcacaccacggcatcttcggcacgggccgcacgctggatgaagctttcggactgatagagactgtagagaaagcggcacagatctatatgaagatcgcccatctggacatcaaaaacacaataccgaaagaacagttgaaagcgctcgccgaaaccttccatgcagtaccaagagaaggctggcttgattaaaaccaaaaaggaggacgagagtatgtatttacaggatatatttggactggacggcaaggtagccgtcgtgaccggaggaggacggggcatcggccaggtgatcgcctgcggcctcgcaaaagcaggggcagaggtcgttgtgatctcacgttccggggcagaagagaccgtgcgtatgatcgaaaaagacggcggaaaagcttatgacctgagagcagatgtcacagatgagcctcaggtggagcaggcgcttgcctccatcctggagcgctccggaactattgatatacttttcaacaatgcgggcatctgcatgcatcagtcgacgatggaggcgaccgtggaggaattccgtcaggtagtggatacaaacctgacaggagaattcattatggcgcgggccgtggggcgcattatgatcgagcgcggcatcaaaggcagcatcatcaacatggcgtccatgtccggaaccatcgtgaacatcccgcagtggcagtgttcctacaacgcctccaaagcaggcgtcatccacctgacaaagtcactggccgtcgagtgggcgcagtacggcatccgggtcaactctctcagcccgggctacatcgctacaccaatgtccgtcgacctgtcgccgcaggaattgatcgacgcgtggatcccgctcatgccgcttggccggatgggaaaaccggaagaacttattcctccggtactttaccttgcctccgatgcgtcggggtatacgacggggagtgatctcatcgtagatggagcgtattcctgccagtaagtgggaatttttgaaaaaatgttgatgggttgtggtgtacggcgcaggaacggaagcagagggtttcaggccggtcggtgcgcttgcaatctgtaagtaaaacagacacggtatagaaagacaccgacagattcaacgggaaatctggatgatttcccgtctcagctgtctcagaaactgcacttgtagtgcagtttctggtctttctataccgtgtctgttttactaacggattggcaaagctccctccgacggcctgaaaccctctgcttccgttcctgcgcctgttctccgcaatggttatatttttttccgggtgtgggattccctggtggggtgcgatggatttacgccaaagctttaacgatatttttattccctttttcctgtaatttgtcccttttctttcaatcgctctgcctgctgcaaggtgcaggtgcatttggcgagggggttgggggttttggcgtattggccgtggtaatcgcttccgccggtctctgtgagatcgtattgcctggcgagttgtctgagtcttgttctggcggcttcggagtttcttgggtgccagacctctactccttgtatgaggccgctttgcgccaattcttctacaagcgcaaaggaatcgaactgttcgggatgggcgacgaccgcgatcccgcctgcgtctcttatggcctctgccgcctctctggctgacggatagctgtttggcacgtaacagcttccccgggaagatatgagttcctccatgagcggtccgatggcagtgttcgtatatccgagatcacagagcacctgcatgatgtggcactcgtagatcgattcgctctccaacgcctgctgttccaccgcctccacggtaaatccgggatacagtctgctgatcttccaggccatctgaagcttctgctgccgtctcttcttcagtgtgtcgtccataaagcgctgcaggccgtcctcatctttcggacagtaacagagcatgtgcacatttctgcccctcttatcgtcccgggccgatatctcagcacccggaatgacctccggccctcccggccctgcggctgcccttgctttccgggaacccgcaaatgtatcgtgatccgtcaccgcaatgtaccggaggcctgcccgcttcgcatagtccagcacatattccacagaggcggaaccgtcggaacatgccgtgtgcacgtgaaggtcgcacgccgcttcttccggtccggtttttaataccatcttattcgttttcattttcaatttccgttatcatatcgatacggtcctgatgtctgcctcccataaactctgcgttcagccactcttctattatcatctttgccagttcaatgccgatgacacgcgctccgaacgccagcacattcgtattgttatgctgtctggacagtttcgcagaataaggctccgagcaaacgaccgcgcgtattccttttaccttgttggccgcaagagagatcccgactccggttccgcagatgagaattcccagatcgacctcccctgcggcgaccgcctccgccaccttcctgccgtattccggataattgctgctctctttcttatccgtgccgaaatttactacttcataacctttttctttgagaaattccaccacttcattcttcatatcgactgccgcatggtcgttgccaattccaattttcatcattctgttcgttctcctctcttccattcgttttctttttatattataatgggtaggtatttaattagcaatacccagaaaaaggagacctgttatgatacaattagtcgccagcgacctcgacgggacaatactgcagaacgacgcccagcatgtaagtcccagaatatttgaacttattatggaattaaagcagaaagggatcctctttgcggcagccagcggcagacaatacagtaatctgcgcggtctcttcgagccggtcaaagatgagatttcttatattgccgagaacggttccctctgcatacacaaaggccaggttctctcacgcggtatcattgagagagaactcggccttgaaattctcgattcgatcaaagaatatggaaaatgtgactgttttctgtcctgtgaatccggcggatacatggattccgacaacccggaattcatccggcacatgaccgaggtcgtaaaatttgatatacgccatgtggatgacctgaaaaagatacaggagcctttccttaagatcgctgtctgcagtttctccggcacccatgatatggcgcccttttttaaagaccgtttccgcggcaggatcaacgtcgtaacctccggcaatctgtgggtcgactttatcgtgccggatgcgacgaaggggaacgctctgtctgctctgctggatcatctccatataccggctgaaaactgcatggcgttcggagaccagtataacgatgtggagatgctgcagctcgccggagaaggctacgccatgtcaaatgccgcccccgggatcgcctactattctgactatgtcaccgattccgtcgaggaagtgctggaagacctcgtgtcttcactgtagaccgcatactgattttttcctttcgccttagcccggtagagtgcctcatccgccctcttcatcactgcgtcatagtttttctctccgggctctgtcatggcaataccgatgctgagacttattccagtctcatcataggccgccttcagaatccggccggcagcatcttccgccactttgacattatcgacccgatacatccagataacgaactcatcccctccaaaccggatcacaacatcgctctcccgcatatttcccatgaggatctgtccgactttaatgaggatgcggtcgccctcatcgtgcccatatgtatcattgattcctttgaaattgtccacatcgataaacaggcaggcgccaaacagcctgttctgatccacatgaagccccttctccacgatacgctttcccgtcacccggttataacagcctgtcagaaaatctctctgcatcttctttacccgcttctccacatgacggatcccgcttatgctcgtcaagagtatgagcaccacggccgccactacaccggccagcatccagagcgaagttgctttaagctcctgaagcaccttctcctccgcatccgtgacgacaagagaacagatcgtccacccgttatactccgaaggctggtaataaaacagacgcaccttgtcattgttataataggtcataaaacccgagtcaccggcagcggcttccttcttcagcttctcaactgcattcccgtccttatactgcattgtctccagcatgtcatatatcgtggaaaaatcctccatccccttataggacgcaactacctttcctgtcctgtcaaacacgagagtggcgccggctttctctgtggtcgacgtattcagagccagcccgagattctgcgtcgtatattccgcgcagaccgcgccgcatacttgcccgtccttccagataggcacggccatcaggacactctcctgcccgtcccagctgtcggtcaggacgtcggagatgacttcctccccctgcatgactttcttatagtagtcccgtccgctgatatctgccgactggttctctccgaaatatatccttccgtgcgcatccgctatgccaaaccgcatatcgtcagaactgtattcctttaaaataacatgccagttttccgcccccgacccctccggaacgtcgcagaacgccgccactgtcctgtaccagttcatccggctgcttataaactgcgaaaaatattgttctttatactcgttttctgtctttaaattcctgtgggcctccgacatcagctttgtattcatgtccatataatacaatacgaccgccgcgatcattgccgccagcagcgcggcaatgataagtacatatttcagataagacaggctcccgtcttttctttttccgttattatccatagcacattcccagccttatacacctttactgtctctattgtactatgaaccggaagaatatggaactatgttttctttttcgtacatacaatgtgcgcagccgtgaagcctgcactgcacggagcgcatacattccggttaaatccccagcttataggccgccgcattccacctgagttcatttttaaactgtcttatctctgtatttttatcaatatagactgcctcgattcccatagcatcagcccagtctcccagctgtccggcgctcaggtcataggagaatgccgtgtggtgggctccgccggcgaggatccacgcctcggcgccggtctgaagatctggctgcggagtccagaatgccgtggcgaccggcagcttcggcattggtttttctgtctttttacagtctacatcattgatgatgagacggaacctgtctcccagatcgataagtgacgctgccactgccggtccttcctttgaagtaaatacaaggcgggccggatcttcccggtctcccattgtaagcggctgacacttgatgcttatcggtccttccgcgacggacggacacacttccagcatgtgcgcctgaagaattccttcttttcccggaataaggttatacgtatagtcttccatgaaagatgttcccctggcgtctttcaccccctccgtcatgatcttcatgatacggaccatggcggctgtcttccagtctccttcgccgccgaatccgtaccccttttccataagtctctgaatggcaagtccgggaagctgctttaaagaaccgaggtcgccgaaatgcgtgacgatcgcctgatagtccttctcttccagaaatctctcaaacccaatttcaatccctgcctgaaccgccacatgctcccggaactctttctcatctcttccttcgagtaaaatgtcatatttgtcataatattcttctacgagtgtgtcgatgtcaccctttgagacttccgctactgcttctgctatctcattgaccggataggtgtccacctcccagccgaatttgatctgagcctctaccttatccccttccgtcactgcgacatttctcatattatcggcaatacgcattacgcgcacgtgactgctctcgatgacaccgaccgccgtgcgcatccacgaaccgatcttcttctgtacctccgggtccgcccagtatccggccaccactttccgctccatcctgagccggctgaagatatggccgtattcacggtctccgtgcgccgcctgattctcattcataaagtccatgtcaatggtatcgtacggtatctcctcattgaactgcgtgtgcaggtgcagcagcggctttctgtactcctgcagcccgtggatccaggacttggccggggagaacgtgtgcatccacgtgataacgcccgcgcacgtctcatcggtattggcctcattgaatgtctttctgatcagctcattcgtgatcaatgtcggtttccagaccacctcatacggaagacctccggaagcatttaaagcctccacgatcctgcgggaatgctctgctacatgcgccagacattcctccccgtacagatcctgagaaccggtacaaaaccaaaacttatattctttgctttttatcatgataactgtctcctttaagtgatgatcatgttcatttactgcttctgtccatagtaagcatccgcgccgtgctttctgtaataatgcttatcctggagttcccggggcgccggcttaacacccgggttgatggcctcacagcgcgccgccatcctggccacttcctccagtaccactgcatgatgtaccgcctccgaggcgtcttttccccacgtgaacggcccatggtttttacacagtaccgcaggtgtggcattgtgatccagatcacgcagttcaaattcatctgcaatgaggacgcctgtatttctttcgtacgcctcctcgatctcctccctcgtaaggtttctcacacagggcacacttccgtagatgtaatccgcatgggtcgtcccgtagcacggaatatcccgtccggcctgtgcccagccggccgcccaggacgagtgcgtatgcacgactccgccgatatccgcaaagcggttgtacaataccacatgggtatccgtatcggaagaaggccgataaccgccttccaccttatgcccctccagatccatgactaccatatcttccggcttaagtctgtcgtacgcgacaccgctcggtttgatgacaaaaagtcccttttcacggtcaataccacttacattgccccatgtaaacgtgacaagtccatattccggaagctgcatgttcgcctcgtatacttcccgctttaactgctccagcattttgtttcctcctgatccgctgtctgtacgtttctattccaaatgatctatcgctgccctttcgatcggaaagccggccgcgtaacgtctcataaatgtctcataaccttccacgtccgccggggcaggcttgatcttcgttcctatatcgccgccaaacacatttgcggacagccagtctgccagcgcttccccggtctgttcccgcctgtaagctgccagaagcgcgattccccatgctccgccttctcccgctgtctccatgacagacactggggtatcaatggcggccgccatgatctgctgccctacgccctttgtcttgaacagcccgccgtgcccgagcatcgtgtcaagcttcacgtcctcactcttcagcaggatgtccatgcccgtcttaagagccccgagagacgtaaagagatgcactcgcatgaaattggccaggttgaacctgctctttggcgtccttacaaacaacggacgtcccgcctcaaatccggtgatatgctctcccgagaaatagttatacgccagaagtccgccgcagtccgcgtctccttccagcgctttctgatacagcgtgctaaacagccggtccgtatctgcttctatgccaaagctctccgcgaattctccaaacagtcccacccaggcattcaagtcagaagtacagttattacagtgcaccatggccaccaggttcccgtcgggagtcgtcaccatgtcgatctcttcgtacactttggacagctccttttccaggactgccatggcaaatacactcgtacctgccgatacattgccggtccgcacggccacgctgtttgttgccgccatcccggtccctgcgtctccctccggggcacacagcgggattccggcccttaagtgtccggacggatcgagaagtccggcgccctcttctgtgagggtgcctgcgtcttcccctgccagaagcacctgtgggagcagttcctctaatttccatggatagcctttatgcgccaccagttcattaaactgcccgatcatgcggttgttgtaattcttacttacagtgtcgatggggaacatgccggaggcatctcccacccccagcaccttccttccggtcagtttccagtgcacataccccgccagtgttgtgaagaagcggacatccgccacgtgctcttctccgtttaagatggcctgataaagatgtgcaatgctccacctctgcgggacattataacggaatacgctcataagctctctcgacgcctgctctgtaatggtatttctccatgtgcggaaggggacaagcagttcatccttttcatcaaatgccatataaccgtgcatcatggcactgaagccgatggcgcccacgcgttcaagaacgatcccgtacctggcctttacatcttccgccagcttacggtaacagtcctgaagcccgctccacacctcagccagatcatacgtccatatgccgtccacaagccggttctcccagtcatggcttccggacgcagcaggggcattgtcctccccgacgagcactgccttgatacgggttgagccgaactcgatcccaagcgccgtctttccggacgcgatcgcttttataatatcactcatattttcagcacctttcttttacgtttcctctatgaagttccctttttccgggccataacaatactctgtatgataaggaacaggcagagcatccccgctatcgtgattccggtccaccatgcctggtcaagccctgcggacgatacgatattctgtatcaggctgagagacagcaccccgaaaagcgtgcctgcaatattgcccactccaccggtcagcagcgtgccgccgatgatggcggacgcgatggcgttcatttccattccgcttgcatgggaggccgcgccgcttcctacatggaggaagtacacatatccgccgatacccgccagcactccgcagagcagatgagcgataaatctcgttctctttacattgatcccgagcatcagcgcactctgtctgttgccgcccactgcgtaaaagccgcggccaagtctcgaccacctgagcaggatgaaaagcaggaccacaagaagcagcgccacgaccacgccgatctccacataggcgtctacgtattttccaattcggtttaccgaacccatgccggggacggtgatacgcgtctccttcaatgttacgaacgcctcgttctctacgttgaacggattcgtgtgtacgatcgtcgtcataccgcgggcgaagaacatgccggccagcgttacgataaacggctggatatccagatatgccacaaggaatccctgaacaagtccgaatcccagaccgatgccgagggcgatcagtgcagagacgaagatgttgccgttcatatagtcgagatatacggcacagcacatgctcaccagcgctgccacacctccgaccgagatatcaatgctcccggtgaccattacgatcgtgaggccgcacgatgcaatgagcagcgccgcatttgcgttcagtatgttaaagaatgtctgtggtttcaggaaacctgagccctggaacacgatcgcacagacatacatcagtataaatactccgatcgttatcatgagcagcaggtttgtatcggacattgatcttatgcgcagacgtttaccgcctgccggcttcttttccgtcattgccatgttaaccaacctcctttttctttaacgtcatcttcttgaatacagatgacattttctctcttacgaccggcgcgcttatgactacgagaacgataacgacgatcgccttgtatgcagaaagcgcatccgattttacattgaacttatagagcgtcgttgtcaggaactgtatgacataagctccaaggacggacgccgtcatgttgaacttaccgccgcttaaggcattgccgccaagggccaccgcaaggatcgcgtccatctcgatatcttttgcgatgaccgaatagttgatggaagagatacggctcactttaatgagcgccgccaccgccacgcataacccgaggatcacaaaacttaagaacttgataaacgccgggttcaggccgttcagccgggaggaacttgcgttgatgccgactgcctgcgtatataacccaaggttcgtaaatttcagcgcaagcgctgttataataatacagccgagggcgataaagaacggggtcgggatcggaataccgggaatgaacccgccaaaatatgtaaaactcttgtcactgacgacaggaagttcattgttattgatccacgctgccacagaacgtcctgccgtgaacaggatcaatgtggcaaccataggctggatgttaaatcctgcgacaagtataccgttgaacgctccaaagagcattgcaaccacacaggcaacaagaaacgcaacgatgatcggcgcctgtaattcatccggtcttgaatccgtaccgcacagcacccgcaatatgactgagcctgcgatcgcgatcgcagcgcccacgctgatgtcctggccgcccgacgccgccgtgacgagcgtcatgccaatggcgagtatggcaagttctgagccgtagtccagtatcgtgatcaaatacccggacaggacctggtcccccgcactgttgacatccatcgatatcttaaagaaggacggatctacaataaggttaaatatggccagcagcaaaagcgccgcaatcggaatgaagatctgttttcccgccatcttaccggctatctggtttatgcttgatttttttgtattattcttctgcattgtctttgtcacctccggcgatcatacccataatactgctctgggacaagtctttgcccgaaagctctcctaccgtcttcctgtccctcatgacgatgaggcgggaacacgtacggagcatttcgtccgtctcagaagaaatgaacgtaacgctcatgccttccgaagcaagtttcagcactaatttctgtatctcgatcttcgtgcccacatcgataccccgtgtcggttcatccaggatcagataatccggatgtgtgaacagccagcgggcaagtatcaccttctgctgatttcctccggaaagcgatttgatcggtgtgtccgcggacgcagtcttgatatcgagaagcttgatatactcatctgcaatctcatttgctttcgcttttgagaatggtttgaagaatccttccagcacctgtgccgccagtatgatattttcacgcaccgacaggtcgcctacgattccgtctcctttacggtcctccggaaggtatgcgataccattcttcatcgcgtcgatcggtttggaaatttttattttcttaccatctttcttcacagttccgccgatgattctgtccgcaccgaatatcgcgcggatacattcactccgccccgagccgagaagaccggtaaatccgttgacttctccttttctgatgtagaagtcaaacggcttgatccctgcgtcactctgcagtccttctgcctcgaatacgggagggactgtgtcatcctgttcatacacaaggctctcatctttgatctcctccgcgtcgtttagttccttgccgagcattttcgccacaagctgcacacgcgggagatctttgatctcatattcccctacgagctttccgtcacgcaggactgtgatcttatcgcaaacctcatatacctgctcgagaaagtgggtgacaaagatgatccctacccctcttgccttcagatcacgcatcagtccgaacaatttctccacttcctgctcatccagagaggaggtcggctcatccagaatgagcaccttacattccatatctacggcgcgcgctatggcaaccatctgctggatcgcaatggaacagtctgagagctgctgtgtggcactggccggtatatccagatttttcagtatcttatctgccgcttcgttcatcttcctccagctctgcccaagacccttgccccggcctatgtacatgttttcagccaccgaaagattcgggcagagtgtgatctcctgatacacggtgctgatcccaagattctgtgcatcctggggagaacgtatcactgccgctttctgaaggcctctgaggtgtatttccccctcatccttcaggtagacgccggtcaaaacctttatcaaagtggatttacctgcgccgttttcacccatcagcgcatgtatctcaccttcacacaatgtaaaatctaccgcctgcagcgcacgtactcccggaaagctcttatggatatttctcatttctaatatggcattttctttcacgagtgcattcacctctaatcctttttttcataaaagggcgcgggagcgtattactgtcccgtacgccgcgccgcaccctcttcaacaatcattttactgcaatttgtttctctattagataccgtactgctctacatcatcctctgtgatcgtagtggcgtcgaatcctttttcatccataataattgtcttttcttctatttccttgccgtcttcgatcgtcttaataacttcatcaatataagaagcctggaaaggattgcactgtccatcatagttccagttctgagcaagcagttcttctaatgcccacttattgcagtcaaatcccataacaatcacgtctttgcccacaccgtgagagatatttgccttgtcaagcgctgccacagcacctttggccatatcatcattctctgcgtagatcacgttgaactcttcaccggaatcgatagcggactgaacgatctgctgtgctttctctgcattccactctgctgtctgctgtgtaacgatgttccagcctttttcctttgccgccgcgtcaagcgctccggagcgtcctttctgtgcagcggaccccataacaccctggatatggataatgttgtatgcatcaagtccctgctcttccatccagttcactgctgtctcgccttctttttccatgtcagatacgatagatgcctcataaaggctctcgtctgcgtcgatcgtacggtcaaacaggatcactcttgtccctgcatcctgggcatccttcagaacagaatcccatcctgccgtgtcggctgcggagaggagaagataatcaacaccgtcctggataaatttctgtgccgctgtgatctgctcgtcattcttgaggctgtaagcaaatgaggcttcatatccgttttcttttgtgaacatttctttcatgtctttgtcattagctgtccggtaacctgactcgttcgggtcattgttgatgatccccacttttatcgcgccgccgtccccggaatcctttttatctgcgtctttgtctgacgctccgccgcatcctgcaagacctaataccatgactgccgtaagcaatactgcaacaactctttttttcataaatttttcctcctgaattttgatagttctatatgcagcgggccccgcttctttgtaattcaaccttatcatctgcgctttcgtatatcaatccataattccttgtatttatgcggtttattagttttttacaatacaaatcttttatgatataatatgatttaaatacaactttttgtccattgtatattattttaagaaataagctggaaaatttacgatttttatagattccggcacgtcaaagagaaatcattttacgaaggccggactgtgaacttccttgaaaatacgagaaaagtttgtttttttactgctatttatgtttttttaaggtaatgcaaatttgaaccgccacataattttacaaatttttacggaggtgtcttatggcaataaaatacaaatggcttgcgggccgtctcagggaactgatcccaaattatatagaaaatggcatcaataagctgccgacagagcaggaactctgccggcggttcaaggtcagccgccagacggcccgcctggcgttgtcgctccttgagaaggaagggctgatcgaaaagaaacgggggagcggctcctacattaccggtctggccgcggacccttgtgctaatgtgatcggcatcctcatttccgatgattcagaatacatatatcccggcgttataaatgatataaagggcactctatcgcagaacggcttttccgccaaagtatatgtgacccgcaaccgtatcgaaagcgagcgggagatactgtccgggtttctcgatacgcctccccgcggactcattgtggaaggcagtaaaagcgccctgccgaacccgaacgtagatctctaccgaaggcttatgaaaaaagggtgcgctgtggtgtttcttcacaactattatccggcgctcaatgactgtatgtatgtaaaggatgacaacgccgggggaagcgccctccttgtaaagcacctgaccgggcagggacataccgccatcggcggcatcttcaaatcggatgaccagcaggggccggaacggttccagggatttgtggaggcgatgagggacgcctgcctgccggttcccgacgaacggatcggctggttttcctcccgtgatctggataagctggagcgctttcaggataccgggtttctgaaaagatttgtgctggaatctctggaatcttgtactgccgttatctgttacaatgatatgatcgcctactttctcatcaaggaacttaagctggccggttaccgcctccccgatgacatggcgctgaccgcctttgacaacacctacttgagcagttccggcattctttatttcaccacacttactcacagatcacatgagatggggaacaccgccgcgcggatgatggtcagaaaattaaagggatctcccgctgtaccgcaggaaatcccttggaggatcaatctgaaagaaagtacgtctgaaaatatgggccttatctaatcttttttgccgttccggtattctctcggacttacgccctgcgtctttttaaatacaaagctgaaatagtgggaatccttatatcccacttccagggcgatctcgccggatgacttgtccgtcgcgcgaagaagctttttcgccttctccatccgcttttccgtgacatattcaataaatgtcttctgcatactctgactgaacacagcgctcagataacttgcgctcacgtcggcttctgccgccacactgctcaaggaaagtgattccatcgcataattactgtctatgtactcaagcgcatgccggagcgccctgccgctttgataactgctccgcctgtcacggatacagaccgccgcctggagcgtatccacaaagtagtcgaatacttccgacggcttcatgtggatatcccagagcttgtgatccatctcctcaacatactcttcctgctccgccccgatcgattccataaacgccatcacggtaaaacggatattgagaacgacataatcccggaacattctcgattccagcgcctcccggatgctcttcagataggattccacgaaatcgtgtatctcgctgctgcttcctctggacagaaagtcccggatgatctccggcgccatcttggacggatccacgtctccgatattattctcctcccccggcgtcagataacttgcaagggtcgactccgtcagcaggtgcaggtccggcatgataaagcggtacgcaaaataatggtttacactccggtaacattcagaaagcagactcaaacgctctaccggtcttccgaccgccacataccagtccatctggtcttcctcctggctgcatatctgcctgatatgctcaagcgccttttctgtcagttcctccatctgtccattttcggccttcacgagtacgccgtagcaattggcgttccaccggaacggaatatactggggatggcgcagaaaataatgcagcacctcttcctgccttctcatgaaccgctccgccctgccgtcgcttaatgtaccggccttttcctgcaggcagaggaacagaagattataacacgaagccgaaagctccagtgatagtttccctgcttcttcatagatgtctttgacagagatctctcctcccccgagcaccttttcaaagaactgcctgcgggaaaactgctcgtattcccgcatctcgctctggaattgcgaccggtacgcatcctgctgcacatcctgcgcgatcttctctttcagctccagcaatacttttctcaaagccgctcttgtcaccggcttcagcatgtactggtcgacgcccgcctcgatcgcctctcttgcatactcaaaatcatcatagccgctgatgatgatgatctttatcttcggaaattcagtccgcaccatcttactcagagacagtccgcccataaacggcatctttatgtctgtgatcagtacatccggtctggctttccgtataagtgggagcgccatctctccgtccgccgcctctcccacgaaccggtaaccgtactgttcccacgggatcttgtcccgcagtccttctctgatcacgctctcgtcttcaaccaaaaacactttcaacatctttttccctctgttcctgttcataaagtctgttaataagatctgtcgccgataacactggctacatttttctttgtgaatactctctccgacacaaaatattccttctcagcctgccccccgctttccagcacccggatcacttcttctatatatgctccctgttcaggattacattcgatatcaacattgataattccctgttctactttctccagcgcagactttgtggcgtcaaaagagatcaagatgataccgccgtccgtcccggtagattgccctgcttccccaatggcctccagcgccccaaacgtcatatcatcattctgcgagacgaccacgtcgatatcttcgtacttctgcagcatttttttcatctcttccctgccttttgcagtcgtaaaatccgcgtctgcctgttccagtatattccagttgtcgtgctgcgctgccacactatcaaacccttccgtgcgtccgataacagaagtgctgccgtttgtcccctgcaggacaacgatatttatttcttcgccggcgcgcccttcttccttcagatgcccggcaagccagcgtccggcattctgtccctcttccgcaaagtcggaacccacccatgcggtatatagagactcgtcctttaccttcactttgcggtccataaggatgaccgggatgcccgcatccttcgcttcctgcagcacggtgtcccatccgtcttctacgataggtgaaaagacaatataatccacctgctgggagataaagctgcgaagcgctttgatctgattctcctgcttctgtctggcattgtcaaatataaggaaataaccgttttccttactgaatgtattctgtattgacgcggtgtttgctgttctccacactgattcacttccaatctgtgatacacctaccacagtcaggctgtcatccttggagatgacgtcatcctgttcgctctctttatggaagtcctgtccgcaccccgacaggaagacgagcacggccaatacagaggatatcagccgtaactttctttttgccctctgtcccatatgtcatctcatcctttcattgtgctgctctcccaccttgacggccggaatcgtgatctccacctttgtcccttttccctttacggagcttatggacattccgtactccgcaccgaagtacatatgtatacgttcatttacattggcaaggccaaatcctttctttgtctcgccgcacgggcgttctatctcctcccggagctggcgcagttcctccgcctccataccgacaccgtcatcactgaccgtcagacagatgatatcccccttcttctccccgctgacacagatcgtccctttcgccctcttgtactttattccgtgatagagcgcattttccacgatcggctggagcgtaagcttcaatatctgataatcatacagaaccggatcgatccaaaactcatattctaatatatcgtggtagcgcatttcctggatctcaagataactccggatatgctgttcttcctgtcctatggagatgaactcttttcctttgctgagcacaagacggaagaaatccgacagcgtcacgaccatctccaccgcctgctccgtctcattgccctcgatcagccagacgatcgtatcgagcgtattatataaaaagtggggattgatctgctcctgcaaaagccgcaggtccgccctgcgcatcttctgttcatcttccttgatcttgccgatcagcgactgcatattcccggccatattgttgaatccatgggccagaacctcgatctcatccctggagtccgcgctggcccgcacttcaaagtcgccctccgctatctttcctgtggcatcatagagctcccgtatcggccggagaataccggaggcggtcagaaccgtcgccacagccaccgctgcaacgagaagcacaacgagcacaatgcatatgacaataaaatcatccatctgacggttgagattacttgtaacctcttccatgctctgtgtctgatagtatatgtaatactggatatcatcctggataagttctgtcaaaatatagatattgttgtccagctcttcgatattctcatcgtaccgctcaccgtcggacacattttccacaatatcatccacccgcttctgaagcgtgtctatattgcggagcagactttccagccacaccctgctctcggcttccgtcgttatgtccatcagcttcgtaaattcactgcgaagctcgtcgatcatgacatacgggtctttcagcgtatctttctccgatatattatcaaaagtaacatatccgaccacaagcttgtacagactctcatccatctcttctttgaagtccagattgtaattgttggcgatcgtaagatttcgcacgatatcatcataggcgcggctgtagtttgtcatggagacgagaagatacacgaccatgatcaaaaatggaagtgccgccatcgccgaaagcagcatgatcttatttttaataggaaaccgtatcttattatccacagatttcttcgcgaaaaatttttctctcttcatcctgtcctccgttttattcattctatcataccgttctttaaatgaaaagaagacaggaaacagtttaccccttcccgcggctgccgttcaattacagcagctcttttattccgtctgccatcgcctccagaatgacgcagcacgatacggctccggcgtccagcacccctctggagcgctccccgagcctgctggagcgcccgaactttgccgccatgtccctggtggaatccctgccggcctttgccgcgcctttcatcttatcaagcgcatcggtaaagtctcccttcgtctttgcttctgccttcagtgtatacacagccggagagagcgtatcgatcagtgtcttatctccgaccctggcctcaacgatgtctgacagaccctcaagagaagcctccagcatctggctgaactgcgcaagcccgatctcctcgaatccatctcccgcctctgccatctccataaataccgtcccgtagatcggccccatggaacctccgatctcattgagcagaaccatgccaagctctctgagtcctccggtaaagccaatttcctttttgccgtatcttttttcaaagactgtaaatcctttattcatattcatgccatggtcaccgtcgccgatcagcccgtctatttctcccagatatgctttgttgtcctggaccgctttgaccatcgcaagcaatactggctttccgtctctgttcttaaatgtatccatatctctgcctcctataactgcgtcattcccatacactccaccggcatgtccagaagctcttttaactcgttgtccagtctcatgactgtcagcgtcgcccccatcatatccagggaggtaaaataatcgcccacataagacttatagacgcggatgcctttgtccgccagcagccggtcgatctcatcatagagcacatacagctccatcacgggcgtcgctccaagtccggatacgagcacagccacttcatcccccctcgcaaaaggaagatccggcagcacgatatccgtcatgcgctttgccattttggctgcactctcaagcttacacacttcgatgcccggctcgccgtggtggccgatcccgacttccatcgtgccctcctcgatcttaaagttgggatgtcctacggcaggaagcgtacacggcgtcagtccgatgcccacgctgcgcgtgttgtcaatggctttctgggcggcggctgtcacctcatttaagtccgcgcctttggccgctttagcgccccctatcttccacataagcacttcgcccgccactcccctgcgcttatcgcgtttttctttcggggcggacgccacatcgtcgtttgcaacgacagtcttcacatcgatcccttcatttccggccatctttaccgccatgcgcacattcatgttatccccggaatagttgccgtacaggcaggcgacgccttttccctggtccgctgttctgaatgcatccagaaacgcggccgctgtaggagaggaacagatctcgccgacggcagccacatcgcatatatttttccctacatatccgataaaagcaggtttgtggccggagcctccccctgtgactacgccggtctttcccgccggaatatttctcgccttcaccactctcggattggccgtggcctccacaatattcttatgcaccttcaaaaaacctttcagcatctcgtccacaacatcgtccggacggttcagtatcctctgcatcttttacagacctcctatttcacttcttttggtacttctttattgttatttgcaaaattctgcaggatgaccagcggttcacagcagctgttgttctcaatgacaacgccctttttggccgctttctccgacacaaagaattcatccgccgagcagtctccaaatctgagcatcacaggagtctcacactcatagcgcccgaaggagccgtgcccctgtacgataagggcgcagtagcaggccgaatctgtaaggacagctttacttttgggctccaccgttacttcctttgcagccacccagtcattggcgtacgcaacccactgttcccggatcctcctctgcccggtcggccgttttaccggctccctgaaataagtttccttatagtcaggccgggtactttctttccagtcgatctggtccataagcgcgcgtatatttcccttctctgactccggctgacagtccgtcagcagatgatgcgggtttacctcccccatcgtaacattttctacgatcgtattcacatcactgttccactgcggctcatacgtgacagccgaaccgggggcatgcacaacgcctgccggagtataccatcccgttccaagcctgatacggtatgcccgggaaagttccgttatcttgttgtcccgcgcgtcgtaatgttcaagacatgcttttacctcgttctttgtcaccgacgggtcaaagccaaagtatgtcagcgggaatctccccatggagtagttatactgccgcggaaaataataggcttccggcttccccatgcgccctatcttttccgcgtgtctgtcatccagatggagatggaagaacaacggcctgtcatagtcatacagtttggcataggcaggccatgtcccataccgctcccacagttcttccccgacaagctctgctttcagctcgcccaccgcctctgcaaataagacggcgcccggttccccccgcccggtggacacataactcattccttctgtctcccctgtcttcggaccattcatagccctcgtcacactgccgagccaccgttcacagatcccgccccggtccattccgaacgcatagtaatcgtccgggtggagcctgagccttttccccggttcattgaatcctctcgggacccatgtgggcgttaacttaaggatcccttctccttcccggaacacttctcttatcacagacataccgacacactcctattccccaagaatctctacatcaatatccagcatctcacagatcatcttcagttcctccgtcttatccccatagaccgcgtggcaatggttggcgtcaaacttgtcgaggaagatctgatggtcaaaaggcagcttcgcaaatacgtgcggccattcttctgtcgtctctttcatcttctcttctggcacggccacaaaatccgccggaatgatcgtaagcctgtacttcccttctctccggttaaggcgcgcgatcgtcgcatgtcccggcgcggtcataagatttacgtggcaccctcctcccgcatagatatcaagcgccggatacagcgtcgtcctgccaagattctccctgtgatcatccgtgccggtcgcgtagtaggtggactgggaaccgcagttgcagaagaccatcacgtcatattcactgtcataatgtcttacatccataaagatgaccggctcatcggtaagcagttttaatatctgcatcgtaagcgccgcgtccgagtcggcctcacaggcatacacgaccggttccttgggaccgtcccagtcatacggatcgttgcagaacgccgcgcagatacactccgtgcagtaatgccggctcatctcatagtggcactttacaccgacaaaatcatattcattttcttttatgatcttcttgagcgcttcatagtggctgatctgtgtctttaatttatccggtgtaaaactgctgccattgtaccggatctctcccatgttatcctccagccagccgagcgctttttctaccttttcctccggaacttcctctgcaagcctgacaagctcgctctgatccatatggtccacatctacgccgaactttttctgccagtcctgcatgctcaccgtggcgctgtacataccaaggctcctgccgccgataagtccgtatttctgtccgttgagacgggtcactactctggcgcacctggcaaagcgtatatactttttaagaacctcaggttctgtcacatctccgctggccctgaagtggcggataccgagatgattgagcgctccgcccgccgccagcatggcgaccatgcccggccagtccggattcagattggccgccagcaggaagggccccttgccgttttgcgcaacgacagcggagaagttggggaatgcaaataccccgtaagacagtatcgtgccgtccacatccatccttttcagatattctgcctgctcttttgccgtcctgacgctgcacacaagttctccggcttccaccacttccacttccccggatgccttaagcgcattcacaatggcgtccacctgctccttaacaattcctttcagctgctcatgcacctgcggatctccatccgagagtccgacaattcctattaccggtttcttcctcattttcttccctcctgcctaacggtcatacttcacgtatcccgggtgtcttcctcccggattatttttctttgaagatacaagaagcttctcgatctcttcccccggaagctcatgtgacacgcccagaagctttgtcatatatgtgatcttcgcattgtattccagtgtctctgtcttgtaataggccttgatgagatcctggcctatcgtaacggtcccgtgattttcaaggatgaaggcgtcatactcctgcaggtacggaatcagcccgtccgccagcgcctgcgtggacggctgtgcatacggcacgaccggcacggcgcccaggccgtataccgcctccggaagtatgtaggaatccagcggcatatgtgcgaccgcaaatgtagtggcatacggcggatgcgcgtgtacgaccgcccccgcgtccccccgctctgcatagactcttagatgcaccttcacttcagatgacggcttatattctccttccagcacctcgcctatttcattgactttcgttatcatctcaggacgcagataacctttgctgatgccggtcggcgttgtgagatattctgattcatttaccttcaccgtgatatttccgtcattggcagccacaaatccatttgtgtacatacgtctgccgatatcacatatgagttcctttagctctctttcattcatcggtatatcctccgtctaattttccagatcaagaattacttttacagccttcttttctgccacaagctgcacgacttcctgaatgtcttccacacttttaacatgactgtaaaagtctttcggatcgatgatccctttttccatcaattcaatgttctcggctgtgaccgcatactgcccataggggaaattaagcatctgcagccgtgtattgttcttaagctttgtcacatctaccactgcgtcagagttcctcagaacccccattgagcccacaatgccatacggcttcagcagatgcgagccttccacgagaagtgacgtaagcccgacaatatcaatgacccggtcaaatattcttccttccagcgcttcctttttgtctacttttgtatagttgatcgtctcgtccgccccggacaatgatctggccagctcaagcctctcctccacgccgtctatggctacgatcgtcttcgcccccagatacctcatatacttcatcgtcgcaagtcccataggaccggccccgtacacgagtacatccttatccgccacgtcaaaatttctggcggcgctgaagcattcattaagcgtaatgagacagcctccgtcaatgacatcaaagtccggcgggatctgtacgcactccagctgtctcgggttgagttcggacagttcccgtctgtcgtcaagcatagccttctggtcctgcacgacgccgtaatcacacattgcgccccatgtacatccataccgggtccccggcatcagctttatgatgggattcatgatgcggtctccgactttataattcctcaccctgcttcccagctctacgatatcacctaccccttcgtggccgagaagcgtcgggaaactgtctacctccaccgacatctctccgcggatgatgtgaaagtctgtcccgttgcagaaaccgcatgacttcattctcacaagcgcttcatacggaccgatctccggcgccgggacatcccgcacgatctctactactccgtttcctgccgccacaacaccgcgcatatatttttcactcataacttcttcctcctctgtctgcctgacctgacagctccacatatttcttatactgtctctgccacttttgtgtattcacgggccggtattcctctgtgcaaaaggagtatcccgcgatctcccgcatctctttcagagacgccgtctcacccatagcgtatgcctggagcagcgcgtttcccacagcagacgcctccgacggcccggtccgcacgtggatgcccgctgcgtccgcaatatactggttcaggatctctatcctgttcgcgcctccgacgatgtacaggacatccactttctttcccgtcgtatcttccagcatctttaaagcacgcaccgactgcagggcaatgctttcatatatgatccgtacgatcctcccggcatcttccgggtgcggagcgtgctggcccgtcttcctgagatatgcgcagatctcatccgccatattctccggatggcggaagccttcatactctgtgtccaccattgcggtaaattcctctgcctgccctgccatgtcttttagatccggatatgtataatacctgcccatccgttcccactgtctcctgcattcctgtacgagccacatggcggttatgttctttttgagcagcacttttccaaaagccatgccggtgttggacagctgataacggtaagacttctttctgtctgccggggcgtccagctccatactcatcagaaaccaggagcctgtggccaggaaagcccagctctctccttctcctgccgggactgccacccccgcgcttgcggtgtcatggaccgcaggcgcagtcacatacgtattttttatgccgagatacgtggcaagatcaggccgcaccgtcccgattctggtccctgccctcactaccggcggaactgccgcttcgggaatatgaaaccgtcccagtatctccttctcccaatcttcatgctccatattaaacagctgggaataagaagccacagatatctcggaacagataacgccgctgaacagatacatgagcagatcacctatgaaaagtatctttttactgccggacagtccttccgggtactcttctttgtaagccagcagctggcacagtgtggaatccggaagtatcctctgggcagtaaggcggcagatctcttcatagtccatcacctgacttaccttgtccacataaccgtccgtcctcttatcccggtagaagacaggcatagacacgcttccgctcaccatatccacaatgccgtaatccgaacaccacgagtcgatcccgagagaatccacatagatccctctgtctgccagtgacttgatcacgctgcatatcctgccgtatatggcgaatatgtctgtggacagatgtccgagaaagaacaccttctctgtaggaaaacggccggcttcctccatatgcagttcttttccggcatccagatgtgccagatatattttcacattactggagcctgcatcgacaacgagataacgcatatgccttcctttctacagatgatagcgacctgccatgtccgtacagccaagcagatccatcttctgtcccataactttcttcatcacttctatcgcgtctgcatatatgacatttggttctctgagcgtctgatcctccaatgtctttctgacctggcggtagaacggatctttaatgtcggaagatatgttcaccttgttgatcccaagcttcaccgcctcagccacttccccgtccgggttgccggagccgccgtggaggacaaggggaatatttacggcagcttttatctctcttaaaatatcgagcctgagctttggaatatagccttccgggtaaagtccatgggcagtgccgatccctaccgccagcgtatctacgcctgtccgttttacaaattcttccgcctcggaaggaatggtatatgtgatctccttcgtcccttcttctgcgctgtttcccatgatccctatcgttccaagctccgcttccaccgacacgccgagcggatgtacaaagtctgcaactctcttcgtaagcgctatattttcttcaaacggacatctggatgcgtcgatcattaccgaagtatacccggcccttatggcccgctctatctgtccgtacgaggaaccgtggtcaagatggatcacaacaggcactctcgtatcgtttgccgctttcacacagtgggtgatgaatgcatctccctgaaattcaagctcatccggatgcacttcaatgatgaccggagcatgcttttcctccgctgtctcgatcgctgcctttaatatctggctgcatccggcattgaatgccggtacggcaaaatgatgttcatctgccacctcaagaagttccttcatattcattaacattttttcttcctcctattgtctgactaattgtacatattctttatatctgccgtcccacttctcactctgccccggctcatatctttcctctgccacatcgcttccggctatgtgggaaaattcctccatagacgcaatatcgccaagcgcatagagctgcatgaggatattgcccgcggacgcggcttccggatgcccgcagagaaccgtacagtcggatgcgtctgcggcacactggttcaggagtctgttgtatcttccgccccctacaatgtacatacatgtgaccgggcgtccggtcacacatcttaattcttcgttgtgtctcctgtattcaagtgcaagtccgtttattacggtgcgcatgatctcagcaggtgtaacgggcactgcctgcccggtccgtctgcagtaattctgtatcttttccggcatacgagacggcttctcaaaatcgggggcatctgtgcagatcatggacggaaagtcttcctgcttttgcgccgccttcgcaagttccgggatccggatatcatatccttcctgtttccactgtctgacacattcctccagaagccataatcctgttatattacggataagccggtacttcttccctggctgcccttcattgctcatcctgtacctgcatgccgcttcggtcgtatatgccctgtcacacacgatccccttcacggaccaggagccgctgctgataaatgagcagtctttaaggccgggtactgtcgcaacggccgacgccgtgtcgtgacaggctaccgccgtcacctgtgtatccttcaggttgggaattccctctgttatctcacttttaagctcaccgacgaccgtgccggaatcacaaagcggcttaaagatatgtgcgggaagtccgagactttcgatcagttctacatcccaacggcacttatgaatgtcaagcagtctcgatgtggtggctatcgtgtattcatttaccatctttccggtaaaaagatatgccaacaggtccggcagaaggagaatatggcgcgcttctttaagaatctcaaaaccgtgctctgccattcccttaagaacatgggccgtacctgtcgtcctataagtagccccggtactcccatacagcgcttcttcgcagtttttaaaatatgtctcatacatgccgtcactgatatcatctctgtatgccagcggttcatccagaaggttcccatcctcgccgagcagcccaaagtctgtaccgaatgtgtcaaatccaatggatctgacggcgtctccctgctctgccgcttctcgtatgacacggatcagctcgttctgcatcttgtgtatgtcccagtggtagtgtccttgtatgagaacgggagaatgccggaatctggccagttctttcatggccagtctgcgtccgtcatatgttccatccattactctgtagctgcttgcgccgatatccacagccagcactctgctcatcgttcttccccctgtcatctctctatcgttttctgcggaaatctcttcataaagtcttctatctgcctctcgcttctcaccgccatatgcgctcctgtctcaagcgcgttgacggcgcccgccgcacaggcgaatctggcgctctcatacaatggctttcccccaagcaccgagtgaatgaacccagccgtaaagttgtctccgcacccggtcgtatccttagcatccacctcgaacggatctacatagaatgcatccttccggcttctcacatagcaccctctgcccccaagctttatgacgaccgtcccggctcttttttcaagcagcgcctccgctgcgtctttttcgtgctccgtcccggtaatgtatctcgcctcatcaatgcttgggatcagataatccacatatgggtatacggcgtccatggcattcggtcccagattctccacatcgtgatccatatcggcaaaggtgagcgcccccgcccttttcgcctgctccatcagtaccttggcgcctcctctgtcgaggcggtacgacgtgtacagacttccgatacagaccgccctcgtctgtcccagcatatccatatctatctcatcaagggaaatgccttcgttatatcctttatgaagaaaaaacttatgctctccgcccttgcccagtatgacaaaagcagtggtagagcggctcgtctcgtcctttaatacataggtcagatccaccttttcttccataaggttatggtaaagcgcctccccgacaggcccgccgtctattctggccaccaggcctgttctgcttccgagccgcccaagcactaccgcctcattcgtcgcatctcctcccgaagtaaagagtacactgtccagcaccgtcaccggctcgtcaaagctttccggatacatcccgtcaatgaggatgtcctgcacacaggagcctacacacaggatatcgtattttttctcttctactctgttcatctgccaccacctgcttctacattttaataatgcctttgactacattctgagcatcctctactacggtctcaaaggcttttcctgcttcctccagtgtgaacgtatgtgtcacgatctgcttcacattgatgcttccgcctgagatcgccgcaatggctttcggataaagattccggtatctgaatacacacttgatcaccgcttccttctccatgacctggaagaaattatagttgatctcgctctgggcagacatgccgacgagcacgatggtaccgccccgcctgacgatatgcgctgtctgtgcgatcgtcactggggagccggctgtctcaaatactacatccggaccgccctccagtatctcctttattttagccggcgcatctcctccgcctgcgttcacggtgtgcgtggcccccatctggcgggcatactccagacgcttctcgtgcagatctgcgaccacgatattggcggctcctctcgcctttgcggccagcagtgtgacaagaccgatacatcctgcgccgagtatgaccactgactgtccgagggacacctcaccgagagacgcagcatgaagtcccactgccagcggctctacaagcgccccctccatagtagatacattaccgggaagcttaaaacacatgtcggccggatgtaccacatactcctgcagagctccccgcaccgggggcgctgcaaagaactttacatccgggcagagattataccgtcccgacttgcagaattcgcattttccgcacgcatatcccggctccaatgccacacggtcgcctgctttaagttctgtgacgccttccccgacttccgtcacggtacctgacacttcatgtccgagcacgaacggcccgtgaagcacacagtctcctactctcccgtccttataaaaatgtacgtcggagccgcagattccgttgtattctatccggacaagcgcacagccctttctgacctctggtatttcctcctctgcgatcttcattgttccgggttctgtcaaatatactactttcatcactctctctcctttttgctgtcatagatgtatactgatttcatagaatcgatcgttctgtctccatgtcaaagagataggatttctccatgtcaaacgccagacggactgtatcgccctcccgcgcttttgtccgggaatgtacgctggcggtcaccttgctgccggcatgttcaaagtatagcagcgcctccgctccgaggagctcatacacctgtatcctggctgtgatacaggacgcttccagtacatttacaaagatttccgcgtctttgatatcctccggccgtatgcctaatattatctcttttcccacatatcccttttccttcaaaggcttctgcctcgactccggcagcgccagcgtgctgccgccggcctcaagcgtcaggacgccgttcttgtcaagaacagcggctttcaggaaattcatctgcggcgatccgatgaaccccgccacaaagagattggccgggcgtgtgtatagattctccggcgtgtctacctgctggatgatgccatccttcatcacaacgattctcgtcccgagcgtcatggcctctgtctggtcgtgcgtcacatagacgatggtagcgccgagccgctcgtacagctcttcgatctccagccgcatctggactctcagctttgcgtccagattagacagcggctcatccataagaaataccttcgggttccggacgatggccgcgcccatggctactcgctgtttctgtccgccggagagttctctcggcttctttttaagctggctctccagatcgagtattctcgccgcctcgcggaccttctgatccacctcatctttggagagcttcctccttctcaagccaaacgcgatattgtcatacacactcatgtgcggatacagcgcgtaactctgaaagaccatcgcaatatcccggtttctggcaggcacctcattgaccacttctccatccagcttaagtaccccggaggtgatatcctcaaggcccgcgatcattctcaatgtagtagatttcccgcacccggacggtccgacaaagatgaggaactctttatctttgatctccaggctgaaattctctacagcgcttactccattcggataagtcttgcagatattctccatgctgatatttgccatcctgatatcctccattcttatttatatagcggcccgtaatttctgcaggcccggtaatcctggctttccttgtccatgccgtaagtattccagcatgccgggcggaatattttttcttcttccacattgtgcatgcacacaggaattctcagtatggacgcgagcgtgatcaagtctgcgcctatatgcccatagcttatggccgcatggttggcgccccagttattcatcacatcataggcggaccggaatgcgccttctccggtcaccctcggtacaaaccaggtgcacggccacgtgtgatctgtcctcctccagagtatatccgtcacctcgtccggcagcgcggccgtatatccttccgcgatctggatcaccggtccaagaccttttacaagattgactcttgtcatcgttaccggcatctctgccctcgtcacaaaccgggacgaataaccgcccccgcggaagtatccctgatctgccgggcaccagacggcggctttcaggcaggcctctatgtcccgttctgtcatatcatagaatggtttcgtgaccgctctgccgcgctcatcttttacttccccgcacatatccagacaggaagcgccggaattgatcaggtggataaagcctcccgcttccctcacccttacgtcaggctcatatactgccacccgccggactgattcattggaccagtatgtccgtacatcggaaaacatctgtgcgcggcccgtcagcagcttgccaaacagcatggataccgcgttcagcgtatcattttctgtcgccagtatataaggctccctcgccccgttccagtcaaaagaggagtttaaaactgcctccgcgaagtctgtgttcggataatgatctgtccactgtctctgcccctggaatcctccggcaatagcgttgtgtccgagcgcctcttccgggaacttctctttcagacggtcgtttccgttcatcagatctttgatgatacaggcagacttcaccacgaactcccagtcgcgcgccttctgtacggatgtctttctggtctcttccggattcttgtcaaatccttccggacagtttttcttcgtccacgacagcgccttcttatattcgtctccgtccagtatattctcttctatccttctgagtatctctacctcatctacagactcgaccctcataccgagatattcttcaaagaacgccgtgtcgacagaagagccggcgatccccatacatacagagccgatctgcagataagatctgcctctcatggaagccgcggcaaccgcagctcttgcaaatctcagtattttctcctgcacgtcctctggtatctctttgtcctctttctcctgcacgtcatgtccgtagatcccgaaggccggaagccctttctgggcatgtgccgccagtacagacgccaggtagaccgctcccggcctctctgtcgcgttaaatccccagacccctttgaccgtacccggatccatatccatcgtctcggagccataacaccagcacggagtcaccgtcagcgtcacctgcaccccttcccgtctgaactgctcttcacaggcggccgcctccgggacacgtccgatggttccccttgcaatgaccgtccggaccggtttcccgtcagaataagtcaggcgggattccatcagctctgccgccttgcgggccatctccattgtctgctcttccagggaacctctgacatccagcattccttttcttgcgtcgatcacaggccggatccctattacaggatacccgccgatatatctgttttccgccaccttcaccgcccctttctcctttggccgctgactctctcatttgatacggccgtcatacgcacgtgtatgcaccgtccacaacgatgtctgtacctgtcgtaaatgtgctcgcatcactggccagataaagggctgctccctgcagttcctccggccgtcccattctctcaagcggagagagctccttccatctcgggatcagttcatgcccttttataagatctgtcatgatataccccgggcttatgctgttcactctcacgttcttgtcggcccactcaacggccagcgatctggtcagcatgataacgcccgccttggatgcgttgtatgccacctgaggctgcggaatatttacgatatgtcccgacatggacgctgtgttaatgatggagccgccgccctggcgtatcatataccggcctgctgccgttgctgtcaggaacactcctgtcagattaatgtctatgactttcctccactgctcatatgtcatctcctccgccgggacattgatggagattcccgcattgcagaatgccacatcgatcctgcccatctgccctgccatgacagcgcacatatgctctacctgtccgggatctgtcacatcggcctcaatgcccagcgtctctaccttatactcttcccgaagccacgcggcagaagcgcgggccttctccccgttcagatccgcaagcgccaccgaggctccggccccggccgccgccatcgcataatttaatccgatcccctgcgcccctccggtcactaatacgttcttatcctttaatgagaatttatcaagtgcgttcatttctgccacctctctatctcctgtacttgctgtcatatatgctgtaaaaatgctcacattcctcttcgcttaaatccagaggagtaccgagcgcgccggcataatacagcgcctttgtgatggcttccgccgcctccaccttattcatggcatcttctgccgtctcgcctaccgccagcacgccatgattgccaaggagcaccacgtcactgtgcgcaaagacaggcaccgcccctttcaatatctcttctgtcccgggcctcccgtaaggcgccacttcaaatatcttaaaattcgccatcatctcgggataccccttcgtctccaccggcttattgcagatggcatgagctgtcagaaaggtcggatgacagtgtaccactcctccgatatccgcccttatcctgtatgtttcaagatgcatgggaagctctgacgtaggcctgcagctccctccgatctgctctttgtcctcattgatcaccgctatcatgtcttcttttaaaaacgctttattttttccggtcggggtgatatatacaaggccgtcctttttcgccgatatatttccctcgaacgcatttacaaggttcttctcatccagccgctttgccacagccaatacctggttaatcaattctctgtccatataaaagtaatctcctcatcatttctttgctcttcttatccttttaccgctcccgccgtcaatcctttgatcagcgacttctgggatatccagccaaatatcatgggcggtatgcacgagatggacgccgacgccgacaactgcgcgataaactgtccctgctgctgcccgaaccttgccatatagacaggaagtgtagccgtcgcattcgtggtcagattatacccgaggaagaattcattccagataaatactgccaccagaagtcccgcagtcatgatcccggtcttcgtaagcggtatgataatacccatgatcagctgtctgttcgtacatccgtcaattctggccgcctccacaacttcctccggcacatccttaaagaacgaatacagaagccagatacaaagcgggagatgaaagcctacatacaggaacaaaagtccgccccgcatatgattcaggttcagttccttaaacgtaatgtaaagaggtatgagaactgccaccggcggcagcaggatcgttgtgacaaaccagttgtagaggctctctccccttccttctttcttaaatctggcaaatacaagggcataagtagccggtattccaagcacgagacagatacccgttccaagcagcacatggaagatcgtattcttcagataatttatcatggatatgtcggataaaaccttctgccatgtcatcagcgtgggatggaaaaagattgccggcaccgcagcttccgcttctgtcttaaacccgctcaggatcatatacaggatggggaaaaaataaagcaacgcaaaagccagtatgatcattcctattatccaccgtctcacttcttttttcgccgcggccttcctgcttcttgaatcccgcttcactactgctttcttcactttgtcccctcctttactcatatactgcgcgccgctttttgatcgccctgaatatcaggttgatgatcgtcagcgtcacgacaacggttatgacagacagggccgcagctcttcctacattcgacccgctgaacagtgtcttgtatatataataggtcagcgtataggacttctgtcccgggccgccccccgtagttgtgagtataaggccgaattccttgacaaggaagataaggcccagcatgagcgccacctgcatatgattgaatatcataggcagctttatcttaaatatcatctcaaaccggctgcatccgtcaaggtcggcccgctccagcacttccgccgggattccctgcaggcctcctaaaaggacgagcacgaagaagggcatccactgccagacgaacaggaagacgatcaggggtctggcataatagctgacaaaatcgatcgcctttattcccatccagtccgcgatcgttccgacccagccaaagttcgtattcaggatcacggtcttccagagcacgcccgtggtcgtcgtcatgataaaaaacgggctcaggatcaaagtcctggacagtgtcctgcccggtatatcacagtcaagcatcagcgcgataagataaccgaacacaagacataagacaagggctgccccgatcatcagaagtgtctgaagacagatgacatagaattcagaatctcccagataatagatgaaattcttaagccccgaaaaagtgattccctgatccggacgtacaatgttccactgcagtgtcgagaagatgatcgtcaggataaatgggatctgtgtagcgaccgccactatcacacatgccggcacgacaaaagttctctctgccggatattttttctttgttatttttactgttttactcataggctccattccattcttcatatagcggccaatgtttaaaagggctgctgcccggccattatccggcgtaagacagctgcccttactgtattggtcctacttcttataaccgccttcttctgcagcttgttcaaaggctttctgtgttgtggccaaagcttcatccagagtgatctcgtctgtgacataagcggccagcgcctctgtcatcttatcccctgcctcctggaattccggaatggcaatgtactgtaatccgacataaggaacctcgtctttacatggatggttgaaatccaggtcagacagcgcatccagcgtaggctgcgcatacgggagatccttgtacgcgtccagctcataagtggaagctcttacacctgacggagtggaagctccgcttggatccttctctagggagaggttcacataatccttggagcatgcccataccatgaagtcaaatgcagcctgcttcttctcatcggaggaattcggattgatgttcataccccagttccagagccatcctgccggtgacggcgcatatcccaccttgcctttgatcagagaatcatctgcctccagattcgggccgtttgatgtggcgtcataccagattccacatttgccggaattcatgagactgatgcactcattatacgtatacgtaatgatgtcatcctgccctgcgtcgcggagaaccttcttatacatctcccatgccgctctctgctcatctgtctctacggttgcgttccagtccatatcatagaactttccgccgagtgcattcactatggtgacgaacggagcgccgctcatgccccagcccggagcgccgcgcatggtcattcccgtgatcccggcagcctcgtcgtcgactgctgccgcgatgtcatagatatcatcccacgtagggttctccggcatagtcacaccggcattctcaagcagttccttgttgtacataaagaagcttgcctcgccaaagaacggcagcgcatagatatcgccggtctccgggtcagataaagaatccagcatactcgggaaaatatcttccacatcaagagcttctttctgttcgtcactcattttgtcaatatacggctgaagattttccgcccatccgtaagtgatccagaagttggcttcataagggcctgtaaagtagatatcgtatgttgttcccccggttgatgcctcaagtgtggctttctcacgcaggtcgttctccggaagcactgcaaagtcaagtttgaccccctcttccttgtagtattctcctgccagcttgaccaggtttgatacgatcggattgttcagtgttgcgatagatactacgatttcatcaccagatgattttttgcttttcttgtcatctgattttcccgcacatgccgcaagtccggcacacatgcacaacaccatcagaagcgccaatattctttttttcataaaacttttacctccttttttggtactgatcgaacttcagacgttcaaccagatataataacccgccgccgtcattctctcctgcaggagggcccgttccctgccggatgactgccctgcggcagaattattcaaacgtaaatactacctttacagaatctgtccccttcccgctctgttcaaaagcagcttcataatcactgagggcaaacttatgcgacacaactccatccgacataagctcaccggtgtacagtccctttatcgtatccgggaaacagccgtagctcaggctgactccatacatatcaagttccttgccgtcgccgatcacgctccagtcacaggtcaccggttccagaaacagactgaattcaatgaatctgcctgccttgcgtataatgtcaagtccctgctttacactggaaggatgcccggtcgcctctatgtacacatcacagccgtagccgtccgacagctccatgatcttgtcttttaagctttcacggttcggatcgatcgtaatgtcgcatccgaactctttggctttcttaagcctttcttcattcagatccagcgcgatcaggcacttcgggttcctctttctggctgccgttaccatacccaggccaagacatccggcccctgatatgactacaatatcgtctttgccgatggccgcccggtcgatagcatgcatggagcaggcatacggttcgatcagaagagctctctcaagaggcatatcctctggtatcttatagacaagcgactcttttgtaagccttgcatattccgcaaatccgccgtttagataattcttaaacccatatacattgtggggtacacagagatgatatctcccttccttacaatatctgcacgttccgcacggcgctatctgctcgaccgcgacccggtcccccactttaagacccgtatccgcgataccatacgtctttttcttatctgtccccggtcccatctctacaatgtatccgacaaactcatgtcccccgatggccggcacttccagatatggcggcgcgcttccgtctccccagaatacgctgccccctttaaacgccttcagatccccggcgcaaatgccgcatccttccaccttaataatcatctccccttcaccggccgacggtctgtccacctcttccagccggtaatcatgtgccccgtgtgtaacaagtgctttcatcttagactgcatctgtaatgccccctttttttggatcatcaaaatgaacttcccttgggtttcttccattctaggaactgaaacgctcattgtctacattcaaaatgttcactttgacttcatattgatagtttcaaaatattttttgtgcatattgcacatggttccgaaaggcaacatgtggttgcttttccgtataatctattatagatttattatttacactttaaaagtgttatttttcactgccagttattggtaaaatagtagaaaaggatgtgaatattgtgaaaaatctcaaaaaactgagaacagaaagaaatctaagccagcagcagctggcagacatgcttcacacgactcaacagaatatttataaatatgaaaacggaatctcagaacctaacttagaaactttgaagaatatggccgatcatttccaaacctccatagactatcttgtcggatatacttcaatacggcacaagatagaaccggtgtccgaatacgatctgaacagtgatgaacagactttgatccaaaaataccgaaagcttctcccgagaatccgcagaattgtccacatcattattgacgagtatctggtaagctccggaaggtgatgaggcaacgctttcttgacatccacaatcgcgctatctataatcataatatgatcacttgtgaaaggagatggcgtgcccgatgaaatcagcatccagacagtcgcttatatatgattacataaagaaacatagtgaggtatccattaatcatatcgcccagtattttaacatttcacctgttaccgtgcgcagatatgttgataaactggaacaaaacggcctcgtttcacgaaaatacgggaaagctcttatcgccgacaacagtaaggcagagctttctttttattatcgttccatgaaaaacgaagaaaataaacaggctatcgcacagcttgcgctccctcatcttctgagggcctcttccgtctttctggatgcgagcacgacagttctggaactgttaaaactgctgcctcactcccacgcactgacggtctatacagccagctcggtgatcctcagctatctgaaagaccgtcccaatgtcacactgttcattatgggcggttatctttctcatacggacggcgccacccttgattctgagaccacggtcaatactgcccggcagatattcgtagacgcggcgtttatttcatgcggcggtttttcagccgaaggtttttttgacaatgccacaacgggtattgaagtaaaaagaatcatgctgcagaattctgtccacaattatcttctcgccgatcacactaaatttaattctaatggaatttttctggtagatacgtgggccccgatacagaccctgatctgtgacgcctctttcggtaaaaaaacagagagacttcttgaaacaaaagatgtagatatagaatatcccaaagccggaagtcgcaatattccgctttgagtccctgactatcagggtaaagaaattgtagcacagctcctgtgataaatcaatgactgatttttcaggctgtaaataaaagccgggagccaccttgcatgaatatgccccctgtctgtctgacagggggcatatcacatatttatttcgtaaatctaagcagtcttcttatcctgtttcatcaatgtcttaataccatccaccgcaagcactactgccagtataacaagcagaaccgcaatgaccgtacggatataacaccatgacacgcctgcgccacctaaggagatagctgccacgtttgacttgatcgtgaaacaaagtgatgtgatcgtcactacgagcataaacgccatcgggatatagaacatcttgttgttctttccggccttgccaagccatgttgcaacaccgagcaggccaagtgcggcaagcagctggttggcggctccgaacagcggccatacgttggcatagcctgtcaggccgaggccaactccgagaatgaccgtaatgatcgtggcaacgatcggatttgtgagtattttcttatatcccgtcgtctctgcaatcgtctcacccggattgagccagaactcctggaacatataacgtgccagacgtgtggccgtatcaagtgatgtcagacagaatgcagacactgcaagcacaagcatggaataagcgacctcttgtgtccctgccagccccggaatggagcctaccatcttggagataccggtggcaaatacaacggtcggcgtaacagtctcccctgacgcatagttcgcccagatgtagcctaccgcgcagagtgatatgatcgcgagcgcgcattcgatgagcataccgccgtatgcgatcggacgtgcatctttttcactgttcagctgctttgccgtcgtaccggaaccgacaagtgagtgaaagcctgagatcgctccgcacgcgatcgtgacaaagagcgccgggaacatgtaaccgagggaagcgcccgtcggcgccagtgtatctttaaatcctgtaaatgcaggaatatccatagacgcgctgcctgtaaacgcacttccgataattcccaccactgccactatcatcataaaatagagcaggaaagagctcagataatctctcggctgcagaaggatccatacaggtgttacggacgcgaccgtaatatagattcccacaatgatcatccatgccgtattgcttaagtataacggatgccagttaaaaccgatggccatacaggcagcaatagcgagcacgccgacgaccgttgacacgccgagagacgcgttacgtctgtatacgagcagaccgaacacaatagcaattacgataaataaaatagaaatcatggcggtcctggcattcgccgcacttgccgccacatccacagccccgctttctgtatatgtagccataaatgtattggcaactatagacgcaaacgctgcaaccacgagaatcaacgtaagataggagaacgtgataaacaatttctttgccttcgttcccatggaatctgctataacttcgcccatggactgtcctttatggcggatcgacgcaaacagtgcgccaaagtcatggacagctccaaagaagatacctccgatcagcacccacagcaatacaggcacccagccgaatacagccgcctggatcggtccgttgatcggtcctgctcctgcaatggatgaaaagtgatgtcccaataatacaggtgcctttgcagggacataatccacaccatcctcctctgtgtgcgcaggcgtctctttggacgggtccacaccccactgctttgcgagccatttgccgtatgtcacatacgcaatgacaagaattgcaataccggctaacaatactacaataccattcattttcttttcctcctcattcctttatttcttctgtatacctgccggacttccttctgttttccggccggctgctaaaaaggtcccataactgcggcctttgtatagcccttcaccaaatccctggcggcgcggctgccgaacacttttctgttctccatgtcgaaaacaagcagccttgcctcgctgtaaccgcgaattgtccatttataattttttacgaagctgaaccgctttactgcctgcttctcttcctcagggacaccgttctcacatatgaatacgcctgtgatgtatgtatacatgtggttcttttccggccatttctttccccctcttacgagctgaggttctatataggatgcaatctgcgtcctgaaacgctccacgtcatctgctgtaaagctgtcctttacacgaaaaaacacgtgctcataacagtccgcccgccacagttctgccttcttaacgaggacatacttggcgctggtcacattaaaagccgcgtgtgcatcatacatatccccattgatactgcaggttcgttctatgtcatagctcgcttcataagaagcaagcagtttttcaaatagctctctgcctgtcatatatgaaattctccttcgctgttactgtgatacagtaaagcatttcttaaattactcttaaattttatcacttttcatcctcaaatgcaagcattttagagtacactctgtaattatttttgctttcaaagtttcttcctccatccacgccggcagacagaccaaaaatgcgccggacaggctgcaaacgaactcgttctgcagcctgtccggcgcattttcttaattcttgtttttattcttctctgtcatttgtcagtttcagcttgtccagtatatagaaaataagactcagcagcataccgacgatgcatgccagaaccatccctgtaagctgtatattcccgaactttacggcaataccggaaagaccggtcacaaacacgactgatgtcagcgtcaggtttctggatattccgtaatccaccttagaatccacaagtatgcggataccggaagccccgatcataccgtagagcagaaaggatatccctccgatgaccggacctgggatcgtctggatgagcatggacagcttcccgacaaaagaacagatgatagaaagcactgccgcaccggcaataacccggacactgtatactttcgtcaccgccatgactccgatattctccccgtatgtcgtcgtcgggacagaaccgatcataccggatatcatagtggagaggttatcacccagcaaagagcggtgaagtccgggatccttcagcagatccctgcccacgatcttgctcgtcacgacctgatgtccgatatgctcagatgttatgacgagcagcaccggaagtatgatcagaatcgcctccatgctgaaacggggcgtctgaaaattcggcatctccaggaaagacgccgcagccacctgtccaaaatccaccatcccgcagcagacggctgctgcatatcccgcgatgacagctatgagtatcggtatgacggataaaaatttgcggaacaggatattgccaaatacagctacccccaatgtcacaataaatacgatcacatttctgccgtcgatcttctcctccagaagtcccgcatttcccgccgccgaaccggccagttcaagaccgataagcgccacgacaggacccatcgcagcgggcggcagcacgatgtctatccattttgagccaaacttgtagatgatcagggcaagcacgcacccacagaaaccgacggccacaaatccgccgagcgcgtactgatatcccatctcacttatcacaattccggccggcgccagaaacgcaaagctcgagccgagatatgccggcgctttccccttcgttatgacgataaacagcagtgtcccgactccgttcataaacagcacgatggccgggttgatcccaaaaataaacggaacgagcacagatgccccgaacatggcaaacatatgctggatactgagcggcacgagcagccggaaagggaccttgtcctccacctggataatcttacgaccttccattttatttcctcctcatctgttcttttcttgtttttactctcgattcccattataccatgaacacagacaagttaaaataatgtttttaaagaccggctccattctgccgcgccaaccgaagaaacggcaagcgcaccgcacttgttggcatatacggcgcactcttttaatgacctcccctccgaaagcgcgtttagaaagcctgcggcaaagctgtcccctgcccccgtcgtatcgacacattccacacccggttcagccggcacggcaaagcactctgttctgctatgcacaacacatccggccgccccgcactttatgataacattggcggctcccgcctgcacaaggcaggcggccgactcttccggcgcttcccggcctgttatgagtgacgcctccttcgcgttggcaaacagatagtcaacatatgcgagcgccggcgccatgtcctctgccgtctcgccgtttttacatgttgtcatgtcggcacagactgtgatcccctgttccccggccgttttgaaaatacgcacaagagcggccgtatctatttccggagagacaaagatactggcaaagcacagaatctttgtacagggagaaaacggcatcttaatatgagagagtgagagctttctcagactgccgtgcggattggtaagaaagctcctctcgccgtcatcctccacaagcacgatattgatgcctgtagcaatatcgtcatgaaaacagccatcctccagaacaattccttccgcagcacagtgttccgccagcatcctgccggccatgtctttcccgatcacggtggcaagcctcacacgttttccaagccgggcaagcacagtcgcctcattcagggcgtctccccctgtggacatgcgtatctcatccgcaggtttagagcctgtcttaaacacatcggcgccgaccggccgggcaagcacgtcaacgatcgccgcgccgatgatcaatatctcactgtccatctgcctttccctcctcttccccttcgtatttctccagaaataactccagcctctcttcacagtccttcccggtgaggtaaagatccggcgaaaatccccggccttctttaaaataatcctcatcccactggtacaggctggtgccgaaactcacaggcacacctgatacaggaagccacaagatctccgtaacgtccccggacagacagccaaaggtgtctgcgcctatgacgaccgtattctctatggcacggcaggaatctgtcatcatctccgcacacgacgcagaccttctgctcgtcacaagaaagagccgctgtgcgttctctatgtgtttttcattatgaggacgaattaccttatatccgttctcctctgtctgtcccattctcatatacattgcctcgtcctcagcataagcttttttatcctcttcctccgtcagcagttcttctttgttcatccgcctcagcacattggcgtgagtcatataaagacttcccgtatattcctcaaaccagccgccgagcgtccgttcctccccgccggcattatcgcttaagtcgatgaccgcgtaaggatatttttttatctttgatgctgacaggataaactcctgagaactgtctctctccggccttgaaaacttgttccacttgatccacggaatccctccccgctcctcataccggtagctctccttcttcgacacctcttcatcctcttcatagtctgtctctgcaagtctcaccgtcttcttaccggtctttttaataaacagtttctgctccgtatattctatttctatctcccggctccgttcacccggctcgctgatcatgtatggataccacgtaagttcgccttcctgtcctatggagggccttagatatttttccggagcctccccgccgatcttctctatctccttcgtgcattctttatccatataatacgttccatcatttttccagtagctcttttcctgatttcccagcaggcagcattcctccgtcgttgaaaatcctatggaaaaatggcggtcgttgtccaccgcaaaagcaaattccctgccgagcagttcctcatattcgccgaattctttcttgcggtccccttcaaatgctttcatcacattgccggccgccgcttcaaacgcctcgtccccgccgcttcgcccataattcccataataagagcgaagcagccgcagaaaccaggccagctcctgctctgcgtcttctttacttatccagggcgccatctccttctgttcctttactgtctgccacaggtcaaagtcagtccccccaaaagtctctttatcgcgtccggctttgtaaaagtattcgtccggtatactttcaggcgcgctgagcccctcatttttcttctccgtctcctggagaaactctccgtacgcgcttttatcatcatacttctttacagactgtccgcatgcggccagtgacagaacagaagccatgatgagcgcaaacgcaagcgccttctttttccaacgtctcatacaccacacctccccgaaaacttttcctcatgattattgcacattcgccaaatgctccgcgcttggctcattgtgttcattatatcacaaaaaacccgggaaaccgaagtttcccgggtagtttatatgctttatatctctatatcactgattattcgatgatcttggcaacacggccggaacctactgtacgtccgccttcacggatagcgaaacgaagaccctgctccatagctaccgggtggatcagttcgatcgtcatctctacgttgtcaccaggcatgcacatctctacgccgtccggcaggttacaaacacctgtaacgtctgttgttctgaagtagaactgtgggcggtagttgttgaagaacggagtatgacgtccaccttcatcttttgtcagaacgtatacctgagctgtaaatttcttgtggcatgttacagaacctggtttaacaagaacctgtcctctttcgatctcgtctctctgaacaccacgaagaagcgcgccgatgttgtcaccagcctgagcctcgtcaagcagtttacggaacatctcgatacctgttacaacagtttttcttgtctcttcatgaataccaacgatctcaacttcctcggatacatgaagaacaccacgctcaactctacctgtagcaactgttccacggcctgtgatagagaatacgtcctctacaggcataaggaatggctggtctgttgcacgctgtggatccggaatataagaatctactgcatccatcagttccatgatcttgtcgccccattctcctgaaggatcttcaagagctttaagagcagaaccctggatgatcggtgtatcatcgcctgggaactcatattcgtcaagcagttcacggatctccatctctactaattcaaggagttcttcgtcgtcaaccatgtcacatttgttcatgaatactacgatataaggaacacctacctgacgagaaagcaggatatgctctcttgtctgagccataacaccgtcagtagcagctacaacgagaatcgcgccgtccatctgagcagcacctgtgatcatgttcttaacgtagtcggcatgtcccgggcagtcaacgtgagcgtagtgacgtttgtctgtctcatactcaacgtgagctgtagagatcgtgataccacgctctctttcttccggagccttgtcgatgttttcaaaatctacagcagcgttaccttctactctctgagaaagagtctttgtgatagcagctgttaaagttgttttaccatggtcaacgtgaccgatagtaccgatattacaatgtggtttgtttctttcaaatttagctttagccattttgaatatcctccttattatatcgccttacaggcatttattaatactttacgtttactcggctatctctgattatatttcaaatcgtacagtttttcaagcctttttaatacttttttaccgcctgtacagctaattaatcattttttgttgataacactttttcctgtacagattttggcacctgttcatagctctcgaagaacatagaatagttgccgcgtccctgtgttctggaacgcaggtctgttgagtatccgaacatttcagacaacggaacgaatgcgcgtacgatctttccgccgccgagatcatccataccttccacacgtccacggcgtgagttgatatcaccgataacatcacccatgtactcttccggcatggtcacttccaccttcatgataggctcaagcagtaccggagaagccttcttcatggcatccttgaacgccagagaaccggcgatgtggaatgccatttcgtttgaatcgacttcatggtaagaaccgtcgtatacgttggccttcagtccgactaccgggaatcctcccaggatacctgacttcatggcttcttcgataccttcaccgatcttcggaatatattccttcgggatggcaccgccgactacgcttgattcaaacttgaatgtctcttcaccgttgacatccattggctcgaatttcactttacagtgtccgtactgtccacggccgcctgactgttttgcatatttgctgtctacgtcaaccggctttgtaaatgcttccttgtaagcaacctgaggagcgcctacgtttgcctctaccttaaactcacgcagaagtctgtctacgatgatctccaggtgaagctcgcccattccggcgatgatcgtctgtcctgtctcatgatctgtatgagcgcggaaggtcgggtcttcttctgcaagcttcgcaagagattctccaagtttgccctgagatgcctttgtcttcggttcgatagcgagctcgataaccggttccgggaattccatggattccaggatcacaggatgtctctcatcacagatcgtgtcgcctgtcgtagtgaacttgaatccgatagctgccgcgatatctccggcatacaccttgtcaagctcttctctcttattcgcgtgcatctgaaggatacgtccgacacgttccttcttgccctttgtagcattcagtacataagaaccggcgttcatggaacctgagtatactctgaagtatgcaagtttacctacaaacgggtctgtcatgatcttaaatgccagagcggagaacggctcatcgtcagaggaatgtctcacaacgtcatttccgctgtcatccacaccctcgatcggcgggatatctgtcggagccggcatatattcgatcactgcatccagtaatttctgaacgcctttatttctgtaagcggtaccgcagcatacaggcactgccgtacattcgcatgttgcttttctgagcgccgccttaagcgcgtctacagaaggttcgtccccttccagatactccatcataaggtcgtcatccagctcgcagatcttctctaccagctctgtgcggtaaagctctgcgtcatcctgcatgtcttccggaacatcaacgatagagatatcctcgcccttttcatcattatagatgtaggctttcatctccatcagatcgatgatccccttgaaatcatcttctttgccgatcggcagctgaaggcagatcgcgttctttccaagtctcgtcttgatctgttctaccgcattgtagaaatcggctcctaaaatgtccatcttgttgatgaatgccattctcggtacattgtaagtgtctgcctggcgccatacgttttctgactgtggttccacaccaccctttgcacagaatacacctacagctccatccagcacacggagtgaacgctcaacttctacggtaaagtcaacgtgtcccggcgtatcaatgatattgatacggtgttccagggcacctggtttgctctggcagttttcctgctgagtccagtgacatgtcgtagcagctgaagtgatcgtgatacctctctcctgctcttgttccatccagtccatagtagcagtaccttcatgagtatcaccaatcttatagtttacaccggtataatataagatacgctctgtcagcgtagtcttaccggcatcaatatgagccatgataccgatgtttctggttctatctaatggatattctcttccagccattattgcctcctagaatctatagtgagcaaatgctttgttagcctctgccatcttgtgcatgtcttctttcttcttcacagatgcgcctgtattgttggctgcatccatgatctcattcgccagtctttcttccatcgtcttctcgcctctgttgcgtgaatacgttgtgagccagcgaagcgcaagagcctgtcttctgtcaactcttacctcgatcggcacctggtatgttgcaccgccgatacgtctcgcctttacctcgagaactggcataatgttattcattgcttcttcaaatacttcgatagccggtttgtctgtcttttccgctactctgttgaatgctccatatacaattttctgcgctacgcctttcttgccgtctaacatgatgttgttgacaagcttggtaaccactttgttgttgtacaatggatccgctaatacgtctcttttttgagtatgtcctttacgtggcacggtccttccctccttaaacataactgtgtaataaatacactgattaattcatcggtactcacatgtgtctttctgatgatactgtgtagtgcggcgggacatcttctatactaataacccgcaacttacttgatcatagttctgtttgtgataacgatactgtttcctgtttcttatttcgcgtcttttggtctcttggcaccatatttagaacgtgcctgtcttctcttggcaacacctgctgtgtcaagtgtacctctgacaatgtgatatcttgtacctggaaggtcttttactcttcctccgcggataagaacaacgctatgttcctgaaggttgtgtccttctcccgggatataacttgtcacttcgataccattagaaagacgaactctggcgatctttctcagcgctgagttaggcttctttggagtagctgtcttaacagctgtacatacgcctctcttctgaggagcagatacatctgtagctctcttcctcaaggagttgtatcctttctgaagtgccggagctgttgacttcttaattgatgtctgacgtcctttctttactaactggttaaatgttggcattcctttcacctcctacgattttaaataagctgcgatttgcattatatgcattatggcgcacaaaaatacaatgcatctttgtgcacgctagaatattttattatgattgtatggaaaagtcaaggattttagcgaaaaaacgtgttttctttctatgtcttttcattgaaagaaataatagaatgcggaaaccgccggctgccggagcttcaaataggtttactgcccggctcatacgccggtccgtatcccacgctctctctctcaatgagcgccggctggaacacgatacattttcttgctcccacaccgttttccacctcttcgatgagctgtcttacgctttctgctcccatctcatagaccggctgcctgaccgtcgtcagcggaacatccagaatttccgaaaagaaaatatcatcgtacccgatcagcgacatgcctccgggcacagggatccctctttttttcaggctgttgtaaacgccgtaggcggacatatcattgaacgcaaacaccgcgcttatgtccttgcccgcgaaaaagtccaccgcgcccgcgccgctttcccggtcgtaacttccttcatagataaaatcatgctgataaggaatgtggtattcctccagagcctttttatatcctttcagacgttccatcgagtcttccaggccgcttggccctgtcacacatcctatatttctgtgccctagtccgagaagatattttacggccgcgtatccgccctgtctgtggtccacgatgaccgaactgcagtcagcctcctccagataccggtcgatcatgacaaatgggatcttcagcttcttcagtaactggatgctctcctcggtctttttcttgtcactgtctctggccatacagaataagatcccgtccacccctttattcgcgagtacctgtatgtatgacatgtcgcgctcatgtttatcgttcgtattgcacaggatcagattccacccctggctgcggcaggaatcctccacgccttttgccagcgtagagaaaaacacattgctcacgtctgatatgatcaggccgatcgtctgcgtccgcttcttgaccagacctaccgcaagctggttcgggtgatagtttaatttttcaaccgcatccaatattttattttttgtgctctttgggatcttatccgctttattgttcaggaccagggatatcgtcgtcaccgaaaaacctgtgtaatttgcaatgtccttaattgtcgttctcaatttttataccctcaccagactatttttttctgtatatgtactttgcttttgggagcgttgctttgcttctgggggcgccgcttcgcttctctttcgccgcttacgggcacagcctcgcaaaagcttcgcttttcctcggtcgcttcgctccccaaggtgtcggagaaaaggcctcttgagctggctcatcggccttgcttccggagcgccgcttcgcttctctttcgccacttacgggcacagcctcgcaaaagcttcgcttttcctcggtcgcttcgctccccaaggtgtcggagaaaaggcctcttgagctggctcatcggccttttgcccgacactttggctctgccctatacgcacattatacaataatttgccataatttggttaaaataatcggtctaatatttttatgtattgtaaatatttttctatttctatgtattcgtttggtttgtgcgcgagttcgggctgaccggggcccaggagaaggaccggggtcgttgggattccttttgtcagtatggatgcgtcggtaaaatagttgatccctgccggttcttttggaaggcctgccagtttcagctcccactggagctttttgagccatgggctgtcagctggtatttcgatggcctgtctgtcgttttttatgtgtacttctacttccagttctccgtctgtctcctgcctgtaaccatcgatgatcttctgcacccattcggtgaccatccgtgttgtaatgcccgggatcacgcggatatcgagcatcagcttggctgtgtccggcgtcatgtttgggacgatgcctccttctgccatcgtgatctggcatgtcggggaaccgagaagctcatggctttgttcttccagcttctttttcagatcctggaaaatgcggatcccatattcgaccgcgttgatcccctgcccggggtatgccccgtggcttgtcttcccgtgcagcttcacctgaagccatatgcagcccttctgggccgtcccgggacgaaggtctgtaggttcgccgatcagcagcagcacaggttcaccaagcgtctgtgtttccagcagatgtttcgccccgattccgttcttttcctcatcacatgtgccgcagaaatatatcgtgcgggagggcacatatcctttctgcttcattcggcccaatacatacgccatcgccgcaaggccgctcttcatgtcgctggctccccttgcatagatacagccgtttttctttgacggcacggacgggtccgtcttccactctcccatcttgccgtagggcactgtatccagatgaccgttccatataacggtctcctttgactttccttccaggactcccaccacattagcatgtctgctgtcgatgtcctggacgaccgcgctgaccccgcactccttcagaaagccgcggagaaatacagccagcgctttttcattgtctttcccgtttaccgttggtatttttaatacttccattaaaaatgtctctgcatcgtacttcatctgtatctcctgttcatgccgaaaacgcctgctgccatcggcagcaggcgtaatatcaatcagtcagccatcctacgatcccctgccagatctgatcgtagctttcccactcacagaattccggcggagcccagtggggggcgcagtctgcagtaaataccgcgctgcgtccttttccgtatgaaccaaatgcgataaatggatccccctcgacgacagccgccacaaaagcttcctctttggcaaccgttttattgtatcccagtacctcgggccactcggttttgatccccttcagcgcctcatgctccttcacgataacagggcgcacgccttcgcagtgctccatcctatcgtccaccgtcagtatttccaccggaaggacttcctgcaccggggtgtcatgccattttcctttggcatccacgccggaaaatgtaagatatccgcctatcattaaaagagagccgccttccataacatagtccctgatcaccctggcccggttcggcatctttttactctgcgtgaacgtagccgccgggagcagaagggtgttcgccccgatatcggaaaggatcacacaatcgtatgatctcagctcctccagcgtatatgggaactgctctgccgctatatgattcggaaggaaatccacctcataacctcccttttccagcgccgcaacgagccacttctccccggtctcatagacagatgtatagaaactgtcaaatcctttcacatgggtagtgtagctcatccatgattctccggctaataaaactttcttcattatatttgtaccgcctttctattttatatcgtacatgggtaattctccgatccccatacttttctttgtctgaaatttactcacccagtatccggccctgcctccagagcgcagataccttttttcaaatgatacgagccttccgttcgtcaacacatagaccgcatgcttccggtttggttctacggccgtaatattggcgtatgcgccgataccaagatgtccgtaccggcttctccactcttcgtttttcgtcctctgcgccagcagttttgcgggattgctcgtcatcagcgccaccgcatcctttttgctcaggactttattttctgcaagttccagcaggcatgggatattatcccttgtatctccgaagcctttcatcgtcgattggttctgtccgtccgatacgaggatcgtaacaacatgctccgccagcgcttccagcgccatctgtcttgcgggttcagccattttcagtccctcccggcagccccctccctcgcgcagcatcgtcgtcacgaattctccgctcacttctttctgcctgcacagatcgaccacctgtttcatcgcccgggcagcttcttcgtctgtaccgcagcccgccgcgttggcatgtccaagatggagatgtcttccttttgccatctcgaacagatgcagcgtatggccgatatcctgcgtgtgggaggtaaacagaaggttggcctgatctgtgatcgcatagagcttctgtatcttttcgtccggaagcaggaagtgccccatgtgttcttttatcccaaccgcgtattgggccgtacggttgacgatattgttatggctcagcttccgctccctgtcttcctgtgccagcgtaccgctgaataaagcggtcagctcctcttcatttaatctcgtcccgagaacatttgccgcgccgagaaaaactcctacgttgagcggaagacctctgtccatctctgctcccagaagcgccggcgccataaacgtattgcccgctcccggggaaagcgctgttgtaactccgtcctcagcggcaccgtatgccgtattcgtatgtatctcaaagagatcgcttacgtgaaggtgtatatcgatcagccccggccatatctccagaccggcacaatctatcagacggtcccctttttctgcacccgccttatcacacacctctatgacctggtcgccttcgatcacgatatccttcaccgcttcaattccatttgacggatcgatgagaaggccatttttcaatattgtatgccttgtatcagtttcatgcatgcccaatttacccacatcccttattcggcggattctgcccactccagaatcagattcgcgtagatcttgatggcgtcaagatattgttccacagtgacatattcattgactgcatgacattgttccagtgaacccggaccgtactgcagtgtcgggcagcccacgatattgtgccatgtcctggaatcgcaccctgccggcgaacctgtcagtttcacttcatttccggtcgctttcttatatgcttctttaaaagcgcctacaaaaggatgtgccaattccatctcaaacggattgcctgtctgatatacgctgatcttaggtttgtgatccttcagccattcgtctccttcacagcatctgagtatggcgccggtatattcttccactacctgctcatggctcatcagattcgggaggtaatggacacatgtcttaaagcagcagtgatccggaatcgtggagccggcctctccgccatagatgacccctacattgcttgacggcggcggtaaaagagggtgcttatattttagcagccagcggtgctccagctcattgatggcatccatcagtttccctgctttttcgatggcattcactcctgccagctttaatccggaatggaccgcgatcccttccacttccacctgaaagaatacccatcccatatgtgccacgatcagctcatagttcgtaggctcgcataccacgaccgcatcggctttcacaccgctcaccgccgcgcagagagagccgttgcccccgccttcttcatcgcatacagacgcgtactttacagtgaccggcagctcgatacctgcgtctttcagaagcgcggtcgccattacagatgccataagccctgctttcatatcggccacgccaagcccggtgatcctgttttcgatgaccgcggggcttaagggcggtatacaccagttctcttcattctccgcaggcatatggtcaatgtgcccgttaaacaggatggaacgctcagattttcccttaaagctggcgtagacgttgtaccggttgtcgtaattatgtccggtattcccttccctgtactgttctttgcatttcacaatactgtcttctttcagcggatcctttacgacttcctctgcccctagcccgcagaacagctctgccataaagtcctgcccttctgcctccaggccgccctcgataccgtggccgatatcatgcgtgtcgatggaaacaagttttaacaaatggtctatatacttttgtttattctcttccaatgccttttcaattctcttattcatcacgttcctccttacgtgcgatcatttgatatacagcttccgcaagccttcggtgtccttctttatccagatggatcttatcgtgatctcctgcgcttgtgatcttatctgcgttcagatatctccatccgcgccgcaatgccagactttcataacaggccgcaagctttctgcttttttcttccgcccctgtgccaaattcattgtaaaacgggctcttttcaaggtcagcaagcactggcggtgccgctagtatgatgcccgcgccggcgcgttcaaatacgtccgccacctgcccgatcccatgtgcgatcgcttccacatccgcgccatactgttctttacagtcattcgttccaagcatgataactgcgatgtcgacaggcgcattgacggcggcgcatacttctgcctccttcaggccattgacaaaggactcggatgcactgtcaaaacaggtcgtcctgccgcaaagtccattctccgtcacccggtatcccggacccagtttttggcttaacagtcccggataacgctcctcccacatgagtctgccgtccgtttccggccggtaaccccacgtatttgaatccccgtagcacagcacctgtctcatgagaccctcacttctttatagcgttttacaaactcccgggcgttcaatatatcttttcccagccctatactgtctgcgatctgcccgatctgggggcgttttatcttgctctgccgtaatatatcatcatcgcggaatatgtcccggacgtttccgtcttttatgatctttttattcgccatagcgacgacccgttcaaagttattggcggcaaattccatatcatgggtgatcgtcactacgccgatctctttcttctccagttcccccagcacccgcgtgagaaccttgatccccgtcagatcctgtcccgccgtaggctcgtccaggatcatgtactgcggcctcgttgccaggatggcggcgatcgtcacgaactttctcgtcacatatgggatctcaaagggattcatgcttaagtaagattctatctccagtaattccgcgacctctttcactctcttttctacttctttatcatccagtttataatattttggcatatacgctatttcggcatatacggtctggttaaatatctggtcgtcggggttctggaatacgtaaccgacctgccgcgctatctgggcggtcgtataatcctttgtgtttctgccttctacaagtacatcccctttgcatggcttatgcaagccgttcatcatttttaccgcagtcgtcttacccgcgccgttctgccctactatggcaactctttctcccctttttacgatcaggtttaagtcgtcgttcgccaaaaatccgttaggatactgaaagctggcgtttctcaattcaatttgattcatatccggcctcccctttttgcagcaggtcaatacactcttctgttgtgaccggcacgcgcggaagcacaatgccgttaagtcttaattcccgctctaaaataaccgcctgaggcagcatcgtcccgtgctccagaagttccagatcgctcagcactgtcctggcgtctccctttttaagcagctcgcccttctgaaacaccagcacctcatccgcatactcagcgatgagatctaccttatgttccaccagaataattgtctttccctgttccttcagcatgtgtatgatctcaaaaatacgttctgttccttccggatcaagctgggacgtaggttcatctatcacaaatatatccgaatccatggcaatgatcgacgcaaaggctactctctgcctctgcccgccggacaggcggttcgggtcgttttgaagcagctcttctatcttcagcagtttcgcaacctcgatcactttctctatcatccgggcctttgggactcccaggttctcaagccccaatgcgatctcctcaaacaccgtcttcctgacaccgctgatctgtgtaaatggattttgaaaaatataacccatcttcgtagacaggacatctacgtcgatctttctgatgtcctctccgtttatcgtcatatctccgactagtttaccgttatagaaatgtgggataagcccccgcagcagattgcagaatgtggtctttcctccggcattttcaccgataaccccataaaactttcccagctccagcgaacaggatatgttcttaagcgccggctctttcataagcggatatgtataagtgacttcctttaattctatataagccataaagcaatcctccctgctatcaatccgacaaaggcaaggtcaaacaagataacaataaccttctcctttatcgccacctccggaagttccgacaaaaatgtgtgcgcaacgggcgctgaaaaagctctggcatccatcgcgatggatttctcttccgtgctggatatggcgttgagcacaagcggccccatgaccggtatatatgccttcgcccgcttcagaagatttccttccgtttctataccccttgctttttgtgactccataatgacctgtgcgttctgcttcagatctgtgatcgtctgaaacgacgacaggatgacaaatgataccatatgtgaaacaccctttttttccagggcatatgtaaattcatccataggcgttgtctttacaaacaatataaacgcgccgctgaatgccagaacgagcgctacgatattaagccctgactgtatgctctccgtcgtcacacagattccccagagccggaacagaacatgctcccccggcgcgaacgctgcttttaccacaaacaggaacaccccgaacaaaagcaatactttccagtataaagaaaagaacgaacggaagcatcccgccgcggcagaaagtaatataaacaacagtaccattccaaaaccataaaagtaattttgaacgataaacggggacagcccgagtacgagcattaaattgactttactcatgggattcaggtctcttatggcattgcctgttctttttggattcatatactgtctcgcaaaatcataatccatctaatcttcctccttttggaaaagattgcagccatatgccgtatgactgcaatcatcctctactgctcttctttgatgaaatgttttccgtttggaagcttcacaacaaaacgtgcaggcattgcctttaagacaaagaatataatgatcagacaaatgatcttatcgatcagctcggatgacagctcacttacaaaggtggccggcagcacatcccagcctgccgccataagtgttgtaacgatcacgctggcccccgttccgacaaacccgccatataaggtcgccgtgatcggaacagcaatgcacgtactgatgatcgcaatgatcacaccattgatcggcgctttccagaatttggagaacatttgcttttttgccaaaaatgaaccgagaaaaccaaacagcacacctatgaccgtgtatggcagaagtgtcggcagtgatatggcattgatcagtccgcatcccaatcctaccagagctcccggaacacctccgcataaagctccgacaacaaacgttccgatactgtctaaaaatacaggtaatttcaacagcaccgcaagctgtccgcctactacgttaaccgcaataccaattgggatcaaaaaaatagttaacttgttaaatttcttcatgtttttcctcctcttacattgacttttctctctttgttgcgtaaatacgtttggtaaaccgtttttccaaatgttttaacaacatcatactttacaattacgaaagtgtcaatcgtgatatttcgacgatttatacgataaatttttgtcaattgtcacaattcgatcttttattttctctattttcaacaaaatatcggcggatttttgtgcataacgcattttaataaaccgatttaccaaataaaaaaaagaactgccgcttccgcagatatcatctatctgcttctgccacagctcctttacataatgccttagtccttacgccagcccgagaacgtccgctatcgcccccatctcctccagagcaacatcgatcagatcatccaggctcaggccggtgaactctatcatctccatataatccctgttggcccccgccgcgaaccgcagttcattaaagcgcttcatcaccgacttatgcttgacgctggcgatccttttatcaggatatatctgcgcgaccgcttttacaaaaccactcatcgggtctgccgccagcactgcgtactgaagcttcgtcttggccttcatgccgcacttcggattgtgcgccttgatggcgtcaaagagcaccggatcgtcgatcccctcttttttcagtatctccacggaagtcggcccgtgcacgcttatatcgttctgccagtcgcactgctcctcatcgagatcatggagaagtccgacgatcccccagtattccacctcatccggagccagacgcctggcaagacctttcatgatcgcctccaccgcgtaagaatgcgtgatatagttttcacctttcatatatttcatcaagatatcatgagcctgttctctgttcattatgcccgtcctccttctatatctcatatgccatatattctaccacaccgggaaataattgtgaatacatacatctgccgtgattttccggttccgccggtatttacattgattctgccgcctgtttcctgtataatctacatggaatttgatcccgttacaggcggaccggtaagaatgtccgcagacagcggcgcagcccgctgtcctgagaatacgaaaggaatatatgtaatcatggaattgacgatacagacgtttataattgtatgcccgcttttgtttctggcgggcatggtagatgccatcggcggaggcggaggactcatctcactgcccgcctatctcctcgccggacttcctccccacgcggcggtcgcaacgaataaaatgtcgtcccctttcgggaccgcgctggcaacctaccgctttgccagaaatcatctcatcaatgtaaagcttgccgttccttctatatttgccgcagtcgcaggctccttcatcggatcacatatctcactgcttgttccggagaaggttatggcgtatgtccttgtgatcatactgccgctctctgcctttctcgtgctgaacaaaaagctctttaacgacagcggcgcagaagaagtcacgctggatggacgcacctacatcaccgccgttgccgccgcatttatcatcggcggctatgacggcttttacggcccgggaaccggtacttttctgatcatcgcgtttaccatatttgcaaagctcagcattaagactgccaacgcacaggcaaaagtgatcaacctgactaccaacgttacctctcttatcatttttcttctgaacgggcaggtcctcattccgcttggccttgccgccgcggcctgcaatatgctgggcgggtatatcggcgcgggactcgtcatgaaaaacggggcgaaggtcgcaaagccgagtatactactcgtgctcgcgctgcttgcgtttaaaataatcggaaacggaaatatctaatgcttttctcttactcagcttccgccagctcaatacgctggcggcaagtcccgataccgccaggaacagaccggcaaaccatgctttttccggataaaacttctcctttgagaacatgaattccaggttatttttttgctcttctatgagtgttgaccagaattctctgtcagagaaatgagtaggcacaatgtccctcggaatccccggcagctgcgtacatatgactgttcccgccgcgatcaggacgaggatcagtatgacatttatactttctttatctctccttttccaatgcctgtacaaagaccggcacagaatgagaacatagacgagaaaagcggctccacaaatgaaatgaggaaaactgtagtcgatacagcgtaaacggacgcccagcctttcttccaactggtcttttatcattttctggcttttatccgggctgcccgcggctgttatatctgtaaacgtatgtgcggactcactatttccgtaatataaaaacagatttctgctgccttttattacatcttgtattttatatttttgttcattgtagacaatatgtaagtttttaacatctgccgagccgaataaactgcatgccaaaccttcgcttataatgcacgtgttcggatatgccctgtcgaatgtcctgctgtccggaaatatgagatccgcgcgttcagtcacggcaaccgcagttgtaaatgtagatttatttaactcctgtacggcaacctcctcattcttcttctcattccaggcagcaaacgctgtcggggcatctgtcctctcgttttcacgctgcagcctgcggaccatctccgccgttctcattaccgctgttgaacctggtaagccagaccttgtcctcaacctgtctcatcttttgattgcccgccagaaaaagtatctgcgaaaataatgccagcccaaaacatattatcgtctttatgctttctttatttttcattgttcttcctttttcacacggcttccatcctcaacataccgggaagactcaaccacaatctcttcactgccagacacgccctctatcgctgcgtaattctcattcttatctataacctttacatttctttttgccgccgtccattcttcccctaacaacgtttcttttttcttcaggacaaacacataatatttttcttccgaatcgagatgaagcgcctccctctccaccacaagcggataatgctcagcctccgtcgtaagcgttaccggcacctggctgccgatcagaaaatcagaataaggaatatcgatttttatttcaatagcctgtgtcgcctgatctgccagcctgacagatgtgatcggaaacgaccgctgttcgatctccaccatcgttccttcacgcaaaagttctttaccttcctctgtaaatgacgcgaccacttccagaccctcgttcttatctgccagtatcatatctgcgccgttcatggttcttgtgcctgcgctgatcaaaatctccttgacaacgccgtcctttggagcggtaattttgtcgtctgttattatctctttcaattgggacaactctttttgcttttgggcggccgcgatatcattcttcaaaaaagcttcagattatcgaactcttctccctgcagcgaagagttactcttcgcacacattgaggaacttcagcttgccgtcatattatcaatatcctgccttttccctccaataggtttattagctcctataggcgtactgatctggatgaaaaaaagaaaaaatactataagacaatagttattttctccgtttttttgtacgttgccaaattattacagcttttgttccatattaaatatagtctttcatttttccagtaactattcgtttacaatagtaaaattaccgcgccgggctttaaactcccagcgccagttcagttacagggtcaaatatatgtgctttatccatatccatcccccatgttaccatatgatcccttctggccgcagtgtccggctccactcttgccgccatactgcttcccgcaaaatcaaagtacaggtatgcctccgccccgagcatctcatatacccggacactctgccgcgttttcatgcaatttctcgaaacgatatcctccggacggtcatagatgtcttccggacggatcccaaggacgatctttctgccgatatatccgttctctctaagccactgccccctgacatgaggaagttttccttccgcctgccccgcctttgcgatcacatcttttcctgactctgtacatacagcctcgataaaattcatctgaggtgttccgataaaaccagccacaaacttatttgccggagaatcatacagacggcccgggctgtcgatctgctggatgacgccgtctttcatcacgacgatcctcgttccaagcgtcatggcctccgtctggtcatgcgtcacatagataaatgtagtgcttaagcttctgtacagcttcaggatctcgcctctcatctgtgtccgcagctttgcatccagattggagagcggctcatccataaggaacacgcggggctctctcacgatcgcccgtcccatggccaccctctgcttctgccctccggataattcacggggcttacgctgcaggataggacggatatcaagtatatcagccacttcctctactttatgccttatgttatctttagaaagctttctgagcttcagactgtacgctatgttatcgtatacagtcatatgcggataaagggcataattctggaacaccatggcaatatccctgtcacaggcctccacctcattcatgcgtttcccgtccatgagaaaaactccgtccgttattccctccagccccgctatcatgcgaagcgtcgttgatttcccacagccggacggcccgacaaaaacaacgaactctttatcgcttacacaaaggttaaaatcttttacggcctcgctgccgtcttcataccgtttatacacatgctctaatgctatctgcgccataacgatccctcctgccttcttcaccgcacagcttcacaacatcggaagctgtctcaaagatataatccgcctcccggtaataatccgccctcgtacttactccgctcaagacgcccaccgcaacgctcccgcactgtctggcaaaccggatgtcattaaacgtatcgcctacaacagctatctcctccggctgaatccctgtctgcgccgcaaacgccagcagcatgtccggcgccggcttcggcgcctgttttccgtcatccgcgcctacatagtcaaaatactctctcactcccagagtatccaggcagttttcagcggaggccagcgtatctgcagtagccagtcctataaaaatccctctctccttcagctgccggaatacgtgttttagatggaacagtggtttaaactgtatctccggccggtttatgtacgcggaaaacaaagatacgagctgcctgtgaatgaccttacacggtatattgattccggcggcggccagcgcctccttcacatgtgaggcgatctcctcgtaagactcaaaggcaagcggtccttttggatctactttcccgcctgacattccgatcgtcctgaacaggtactccctcatcttttctgtctcttcgatcccgttttctctcataaatgcgggaatcactgtccgggcagcctcttcccacaagtcaaagaagtcgatcagtgttccgtctttgtcaaataatattcccttgatcatgctcttcctcctccatgtattgtaccgcctccttgaaggtcttcagtctgtgttcttttttcccgctgtaaatggggttcacataggcggcaaactctcctctgctgtctcttacatcgaggcgggcccagtgccagaaatccggttcaagaccgatctgcgcctcaccttcatagacatccggcccgctccttaccagttctatacggaatctcacacggttcattaccatatagacttgcggttcttcctccagtccggttattttcacacagtaccgcacctctgtatgctgttcacacacaatctcatctcccggcagataagacacgcctccggcacagatattcagttccagactgcagtgcctgctcacatagacatgcccttttttcatcgcccggagcatattttcaggtgacagttcctctgtaaatacatacgttccgggatctccggcaacagacggctcccgggcgccctcataatactctgtgatgagattatgggagtcgcttcctcctatcccgtatattttgtagccgtcctgccacagccagtcaagaaagcggattgccttccagttagattttccggcgtatgtgtaggtagggtcgttgactatctccagaaagtcgatctgcccgaggggcgtttcctcatatttccacttccagatatgcaggaacggatgatttatgctgatgccccatcctcttttccgggcctcttcccacacttctttcatatatgcccctgtatgcgttccgcccatatgtgccagaatacggggaagcgcttccggcatcctgtcgataccgaagagattgcagtgtccctgttccgttgttacttcaataccggggactgccatgacttctgtctccacccagcccgtatgtatgacgttatgctctgttggcacgtaaaaatccagctccatatctgccgcttttttcatggcattttccaccgtttccctgccgtccgaaaggagtgtatgcgtatggaagtcccctttataccatctccgctctctccggaacactttattccagtcatacatatcgtggaacagttccccctcgcccctgccgctcacccagcagtgcctgccggtataatccggccgcggggcgtctccctctgccgtgtctgccagtctgactgtcagagtacatgcgccgtcgcccggacgctgcttcacgtattctgcaaatatatatatgatcagttcccaccgtcctgcgccgacggaaccgggcacacctccgatactcgtatcacacggccctctgccgatacagatcagcgggctcccatatccgatcagcttctgaagtcttatatgtccgccctcgtccttcaatatgatataaccggccgggccgcagtcctcctctgtacccacctctatatataagcgttcaagagactggggaatccaaaaggactccccaaacatcggctctgtatgtttattgatctcaaatgtaaaacttttatccatcttttttactccacgctgtccaacgcagcctgtgctgttttctgtgcctggtcaagcgcttcttttgccggctttccctctatctccacctgatcggcggcaacggaaagcgcatcgaagatcttgcctcccgtcggatcctccgggaggatcgaaccgtgctgtgcctgggaaaatggtactagcgcctgcggattttcttccgtataacttttatactcgtcaacatcctgcgtagactggcgcaccggtacatagccggtctccatggaccactccgcctgctgctctggctcagtaaagtatttcataaaatcatatacgccctgcttttctttgtccgtggaatctttcagcatgatgagctgaagagcatccgcagtcggtgcggacggattgcttccccagccaggctgttccatcgcctgcactatggaaaaatcaaggtctgcctggtctcccgatgaaccggtataaccgccggccttattctgaagcacatcgtcaatggtggagtaccagtattcccatccctgtcctccggagtgaatgcgcatgattttatcgtcgtggatccattggcggaagctctcccatacttctacccactcttcactgtttatgagtaccttcttgccgtcgtcgcttaagattttaccgccgttgctcaaagaagcgtccacaagattatcctttccccacatcggctcccagccatagaaagatccgccgccggacattttctttgccgcggcctccagatcctgccacgtcttgatcgtatcagggtcaacgccggcatcctcaaacgcctgaacgttgtagtacatcacctgagtcgtgccgtatgcaggcagtgcaaagagctttccgtcttcatctttaccctggtcgaagaacaccgggaggtagtcggactcgtcaaacgtatcgtcgtctttgatgtaggaactgatgtcttccgtcaggcccttccttgagagatttctcgccttatccacatccagaagcgctatatccggcgctttctttcctgcgatccctgcctgcagcttctcgtatgtctccgtgtaatcggcctgtgtcactgtattgatgtggtattcggactgtgactcattataggcatttacaatgccctgaaatacattgaccgctgtctttcctcccgaataccagaagtcgatctccgtcgtcttgccgtcttcagccgccgaagccttgtctgtgctgccgcatcctgctgccagcgccgccgtgacagatatgacaagcgccatcgaaataagctttttcattttcatatgatttctccttacccttgttgtattttataatgcatctatgtaaaaagggatcatcccttcatacccgtgtctcctccgataccgttgataaaccacttctgcgtaaacccaaacagaatcagaagcggtacgacgatcaatgtgcttcccgccataacaagcggccactctgtcccatacgccccgccttcgataaagaagcgccgcagtccctgggacaccaggcttaactccggtgaatccgtgatcagggacggccacatatagttgttgtaacaggtgatgaagctcatcagaataaatgtgataaaagacgatttcgtcataggcgccacgatcttccacaatatctgccagtggcttgcgccgtctatccttgccgcctctatcattcccgccggcacctgcatgaacgcctgcctcaggagaaatatgccgaatatgctcaccatgcttgatatgataagcccccggtaagtgttcagcatattccagtctgccagtatgatatagcttggaatatatgtagccgcagtgggcagcatgtacgtccccataatcagcgcaaacagcgccttgcgtcctctgaatgtcatgaacaccatggcatatgtgatcatggcgcccgtcacaagctgcagtcccaccgtggcagtagaaacgaacaaactgtttcctatatacctaagaagcggcgattcaaacagcaccgatcggaagttctgccactgaggggtggccggaaagaactgtgtcacatccatcacttccgcctttgttttcagcgcgctcaaaaccatccagagaaatggaaatattgtaaatactccggctgtaaaaaggaccgccgtcttccccgcgcctctgaccgcttttgccgccttaaacgacaatgggatctggtgtacctgtgctccgccctgccggtcatatttttctaatatattctgttcattcattttatcttctccttatcaatagtggacccatctcttggatgcctgaaactggaatacggacagcgctactgtgatgaggatcagcaccatggccaccgctgtcgcctgccccatgtcaaattcctcaaatcccagctgatagtacatatacaggagcgtccttgtgcttccggaaggtccgccctgtgtcaggatctgtatctggtcatacgcctggagtgaatttatcatcgttatgatcgtaagaaagaaggtggtcggcgagatacagggaaccgtaatatcgcggaacctctgccatcttttcgccccgtcgagaccgcacgcctcataaagttctcccggcactttctccagcgccgacagatagaagatcatggcatatccaaggcttttccacaccgtgacaagtatgacagacagcatagccgtatctgaactctggatccactgaaggcccgggagaccaaaaaaacgcagaagagcattcgctatccccgtatccggctggaatatccatgtccatacaatagataccgccacagtcggcgtgatccatggagagaataatataaactttacgattccgctccccctgaaatacttctgaagcagaagcgcaaggatcagtcctccggctatcgtcggtatgagtgtccccagggtaaatactaccgtgttgcccagcgcctggtagaatcttgtatctgtgaacagttttataaaattatcaaaaaagacaaactgataatccggcgacatataatcccagttggtaaaactgatgagcagcgatttcaaaatagggtagatccagaatattgccaaaggtacaagcgcaggcagtacaaacaacagcacactgcttctatttttcattttctgcatttttctttttcctcttttctccttttattcaacggccacatcttaccaccgcagtattaagtctgctttttcttcttgtaaaacatatgttaaatataagaagcataacgagctggccggccggaaaggcagcccataccccgtttatcccccatatttccggtaggataaaaaggaggacgggcatggcgatcagagtctcgccgtatattaatctggaggcgtcttttatccgaagtaccgaattcatgtatgcaatatggaactttaccggtcccataacgaaaaacgcggtactgctgacagtcatccctgtatcaaaataagctgccgaccgcttggacaacccgaacacatcggggatcaccggcttcaccgcatatacgagcagggcaagcagcagtcctgcggccgccgcaaaacgttcccccgtaatgcggatatacgcaagctcctccatacggtctccgccgcagtaataactcatcaaaggctgcgaaccgtctccgataccggtcagaatatactgtaccggaaaggtgatataagagatgaccgcataacatgcaacagcagcgccgcctccgtattgaagacatctctgattcgtaaataccaggatcagagacggggcaagcgacagaccaaacgccgaagccccggtcctcaaaatgtgcaccgccgttttccgatccagtgtaagcttcagcggctcctcccctttgccataaatgaggaaaaatcctgtcagggccgtcacaagctgcgccgccacagttcccagcgccgcgccgcggacacccagaccaaaccggaagatcagaatataattcagtacgagattcacaagcattcccgcagacatgcctgccacagctccaagagcccttcctctattgcgcaggatggggatgatgcccgtaccgacggtctgaaaaacagcgcccagtaaaatgacctcactgtaatctcccgcttttacgctgacatctcccgaggctccgagtatgcgcaacatctgcggatataaacaatacaggaccccggttataaagaggccttccacgatcaaaagcgtcactgtctggccgtaaattttactgctcttttccccctcacccatccccctgcagttagagtagaggatgctgcctcccatccccgatccgacgccaacggctgttacgaaagccggcagcggccaagcgatattgacggctgcaagtcccgcgtcacccacagcccgtccgatgaacaggccgtccacgatcgaataaagcccggacagcagcagggcgaaaaccgcgggcaggcaatcctttgcccaattttttctcaaagcgtttttatccatcacagattcctgctccttccgtatgatatcttgcagtgcaaagggcctaaccgcctgacggcgtatcatgacccccgaaaactctgctcagcgaaattataaagaaggtttgttaagtctctgctctgttttatgataaaagtttgttaattctgaaccattccggaaaaaggcacaaaaaaaaccgcggcggataaatccgccacggaaattttattaatgtctgttaactttttactcttccggtactacaataaggtctttcgtgaagtggttcagcacttcgcatccgtcctctgtaatgatcacaagatcttcgatacgtacgccgatgccctcttcctggatatagatgcccggttctacggagaagcactgtccgactttgatgatatcctcatttacagaagacacatctccgaactcatggtcttcaagaccgatggaatgtcctgtcctgtgcgtaaaatactgtccaaaccctttttcttcgatgtagtttcttgcagccaggtctacgtcgcacattctgttgcccggttttgcggcttcgataccacgtctgttggcctcaactacaatatcgtagatttcctttgcgcggtcggacacttcgccgataaatactgttcttgtcatgtcagacgcataattgtctttgaacgcaccgatgtcaagcactacgcagtcgccgcgttttcccttggaatcgtctgttacgtgatgcggatccgccgcaccttttgcataagctgtgatcgggtcgaatgacacatccccgcagccaagctctttgtagatctcacggatcttggcgttcagctctctctccgtaagtccttttgatacccatggaatcagtttttccatagcgatatcattcagtctggaggattccctcatcagttcctgctcgccttcatcctttatcatacggatgtagtcaacgatgggagaaccgtttacaaatttgcttccgccgcccagttcctgcagacggatcaggaattttgcaggccatgtcttgtcaattcccataaccttgtctttttcaacaaatctgctcatgatctcaacaccgtcctcgatgtcatcataccacacgatatctaccccaagatctttttcctgtggaaacagtttgttgatcatcattttgtgattaccgtttacattgagatacaatgcaagtaatctttcacctggatgaatccatgctcctgtcagatagaagatggctaccggatcagatatgatcatctgcgggactccgttttcttccattgactttaaaactcttgaaactttgttctggtccatattttccccaacctttcattgtgtattcggcattaaaaccggcagctgcacactaccggtttcaactagtctcattatattatcttgtatagaaaaagtcaatctacttcctttcatccgcggacttcatcccgcaactgtgggcacagccgctgcagccgcatccgcaggaaccacccgcctttttcttcttccacatactgcggacgataagggcaacgataccgagtacgataagccctactgctgccgttgaaacaacgctgctgattgctgccaatgccataatatcaccttcttttttgtctatgcttttgccctgcgggcatttacgcttgatacattcactttcagtgaagaactctccttatacggcctgaataacaggtacaaaaagccgatcagtacgatcaccgcggcggctgtgccgattccgaatccgccgcctgtgaacaggctgccgaactggtacacgcagagtgagaccgcataggcaagtatcgtctggtatccgatggcgaaccagaaccattttgcattgttcatctcacgcttgatcgctcccatcgcggcaaagcaaggagcgcacagaagattgaatacgaggaaggaatatgccgctacagcggtcatgcttgccgcaagcgttccccatacttctgctccgtcttccgccacttctgcaaagccgtaaagaatgccaaatgttcccacaacgttttccttcgctacaagtccggtgatcgcggcaaccgctgacttccagtctccccatccgagaggaacaaagagccatgcaaggcctctgccgatacttgcaagcagaccgtcactcaaatcttcaaccattccgaaatgtccgtctacaaacccaaagctggatgtgaaccatataaatatagtggacagtaaaatgatagttcctgcttttttgataaaggaccatccgcgttcccacatacttctgagcacgttgctcacagtaggcatatgataagccggaagttccattacaaacggcgccgggtctccggcaaacatttttgtctttttcagtatgatacctgaacagataattgccgctatgccgacaaaataagcgctcggcgcaacccaggacgccccgccgaacagcgctcccgcgataagggctatgataggaagctttgctccgcacggaataaacgtagttgtcatgatcgtcatcttgcggtcacggtcattttcgatcgtcctcgacgccataatgccgggcacgccgcatccggtgccgatgagcatcggaataaatgactttccggaaagaccgaatttgcggaagatcctgtccatgataaacgcgactctcgccatataaccgcatgcctccagaaacgcgaggaatataaagagcacgagcatctgcggcacgaatccaaggaccgctcccacacctgctatgataccatccaggatgagactctgcaaccacggcgcacaattgaccgcgcttagaccattctccacgatgaccggtatgcccggcacgtcgacgagtccgaacagcttccatccctcgccgaacacgccgtcatttgcccagtctgtcgcccatgttccgaccgttgacacggacacgtaatatacaagccacattacaaccgcaaatatcggcagcgcgagccatcgattcgtcacgacccggtctatcttgtcggacgttgtgagcttctctttgttcgcttttttaaggctctcgcctatgatggaagttatgtaattataccgctcatttgttatgatactctccgaatcgtcgtccatgtccttctcggccttttcgataactgcggacacatccggcgcatgcttcatctgttccgcgatcttgtcatcccgctcaaacagctttaccgcatagaaccgtttctgctcctctggtatatcaccgtcaagcatcgtctcgatctcatccagaacagcctcaacttcctgtgaaaactcatgcacaggcgccaccgcctgttttgcctgcgcggctttcacagcctttccggccgcctcttcgattccttcgcccttcagcgcggagaccgccacgactgcacatccaagcttttctcccagttttcttgtatcaatcacgtcgcccgatttttttaccacatccatcatgttgaccgccatcactacaggaataccgagttccatgagctgtgtcgtcagatacaggttacgttccaggttcgtgccgtctacaatatttaaaattgcatccggccgctctgtaatgagatagtttctcgcaactacttcctccagcgtatacggtgacagggaatagatccccggcagatccatgatcactgcttccttattgctcttaagttttccttccttcttttcaacagtgacccccggccagttacccacgaactggttggaaccggtcagtgcgttaaacaaagttgtcttgccgctgtttggattgccggcaagtgctatcttgattcccatctctattcctcctgtaatgtcttattcacgagcatcttctctgtgactctctaatttacctcgatcatctctgcgtctgctttgcgcagggacaattcataaccacggacggtaacttcgaccgggtcgccgagaggcgctacctttctgacaaacacttccgttcccttcgtgatccccatatccatgatccgccttttgaccgctccctcaccgtgaagcttgacgaccgatacgctttgattgcatccgatatttcttaatgtgcgcattcctttccttcctcctaaaccatgatcttgtttgcgatccctctgctgaccgcgactctggattcctttacctgtacgattatgctgcctccgttctccgagactaccttcacttcttctccggtcacaaaaccaaggctctccaggaatttcttcacctcgttttgtccccctacacgtttgatcgatgcagtttcacccgatccaagcattgtcagtggcatcattatcactcctttttatccacattatatctgcaccgccatctctttcctgatcagatcaaggtcctccagcagctgtacggtacggtataccgttgcaatgccaagtctgttgtctatctgctttgcggcaaaatagatctccttacaggaagaatgttcattgctgagtatgacttccagcagcatctttctctggctcgtgatccggtatccattttctttcaggcggtttgttatctcctgcagacgttcttcctggttcatattatcactccggcatttctgatattgattatcatttacattggtattatattccttatgagaatctttgtcaataacacaattgatattttttatcaataagaaaaaagatgtgaaaacgccggtcccgtactgctttacgcaatcgggaccggcgctttcacatcttatattataattttattcttctacttccacgaattcttccgcttctgcctctgcctccggttcttcgtcgaacataagctcatcgttcatcgtaaactctgtgtccagcctgacatcacggtatttcctcatacctgtaccggccggtatatgcttaccgatgatcacgttctctttcaggccgataagcgggtcgaccttgcccttgatagcggcttccgtgaggacctttgtggtctcctggaaagatgccgctgacaggaaggaatttgtagcaagagacgcctttgtgataccgagcatgatctgctcgcctgtggcaggctctttcccttcttcagcaagtttctcgttcacatcctcaaagtcaaggatgtcaacagttgtacccgggaggaattctgtgtctcccgcttcctctatacggactttcttgagcatctggcgtacaatgacctcgatatgcttgtcattgatctcaacaccctgcagacggtatacgcgctgtacttcctgaatcatgtagtcctgcaccgcgcgcagtccctttatcttaaggatatcatgcggattgacactaccttctgtcagttcgtcaccggcctccagctctgccccgtcctgtatcttgatcctggaaccgtaagggatgagatacgccttagattccccggtctcattgtttgtcacgatgatctcacgttttttcttcgtatcgttgatcgatgccgtgcccgcaaactctgtgataatggcaagacccttcggctttctcgcctcaaaaagctcctccacacgaggaagaccctgtgtgatatcgtcgccggccacaccacccgtatggaacgtacgcatcgtaagctgcgtaccaggttcaccgatagactgagccgcgatgataccgacagcttcacctacctgcacaggttcgcctgttgccatgttggcgccgtagcatttcgcgcacacgccgctgtgagacttacaggagaggatcgtacggatcttgatcttcttgagcggcccgcccttctcgtcgacaccttttcttatgatgagctctgctcttttcggtgtgaccatatggtttgccttcacaaggatattgccgtctttatccacaatgttttcacagagataacggcctgtgatacgttcctgaagactttcgatctcctcgtttccgtccatgaatgctttcacatacattcccggaatctcggcgcccttctttgcacagtccacttcatggatgataagctcctgtgatacgtcaacaagacgtctcgtcaggtaaccggagtccgccgtacgaagagcagtatcggaaagtcctttacgcgcgccgtgcgcggacatgaaatactccagtacgtcaagaccttcacggaagtttgacttgataggcagctcgatagtacgtcctgttgtatcagccataagtccacgcatgccggcaagctgcttgatctgcttgtcggaaccacgggcgccggaatctgccatcataaagatgttgttgtatttatccagacctgacagcagcgcttctgtcagcgcgtcgtccgttgccttccatgtctctaccacttctttataacgctcttcttctgttatgagaccgcgcttgtagttcttcgtgatcttatctacagtatcctgcgcctgctcgatcatctccggcttctgcggcggcaccgtcatgtcagagatagataccgtcatggccgctcttgtagaatatttataacccgttgatttaatggcgtcgagcacctcggcggtagccgttgctccgtgtgtgttgataaccttttcaagtatctgcttcagctgtttctttccaacgtggaagtccacctcaagcagcaattcatttccttctgcctcacggtctacaaaaccgaggtcctgcgggatgatctcattgaagatgaaccttccgagtgtagactcgatcgtttccgtcttcacctctcctccatgcataaccttggacatgcgcactttgatacgtgagtgaagtgtcagcgcgttattttcataggcgagtatcgcctcattcacacttttaaatactttgccctcgccttttgctccgggtctttcctgtgtcagatagtagataccgagcaccatatcctgtgaaggtacggcaaccggtcctccgtcggacggtttcagcaggttgttcggtgacagaagcaggaaccggcactctgcctgcgcctccacggaaagcggaagatgaaccgccatctggtcaccgtcaaagtcagcgttgtaagcagtacatacgagagggtgaagcttgatcgccttaccttctacgagaatcggctcaaatgcctgaatgccaagtctgtgaagcgtaggggcacggttcagcatgaccggatgttctttgatgacatcttccagaacatcccatacttccggctgcagccgttccaccatttttttcgcgttcttgatattgtgcgccgtaccgttttgtacaagctctttcatgacaaacggcttaaacagctcgatcgccatttctttcggaaggccgcactggtatatcttaagctcaggcccaacgacgataacggaacgtcctgaataatcgacacgcttgccgagcaggttctggcggaaacggccggatttacctttcagcatgtcggaaagagacttcagcgccctgttgcccggtcctgtgaccggacggccgcggcgtccgttgtcgatgagcgcgtcaaccgcctcctgaagcattctcttttcatttcttacgataatgtccggagcgccaagttcaagaagacgtttcagacggttatttctattgatgatccttctgtaaaggtcgtttaagtcagatgtggcaaaacggccgccgtccagctgtaccataggacgcagatccggcgggatcacagggatcgccgtcatgatcatccactccggcttgtttccggattcgcggaatgcttctactacttccagacgcttaacgatcctggcgcgtttctgtccggtagccccttcaaggcctgactgaagttcttcgtattctttatccaggtctatggcctccagaagctccttgatcgcctctgcgcccatgcccacgcggaaggaacttccccaggactctctcgcttcctggtattcctgctcggaaagcacctgcttatactgaaggtcagtctctcccttgtcgagtacgatataagacgcaaagtacagcactttctccagtgttctcggagacaggtccagaatgagtcccatacggctcgggatccccttaaagtaccagatgtgggataccggagccgcgagcgctatatggcccatacgctcacgccgcacacttgcctttgtaacttcaacaccgcaccggtcgcagactacacccttataacggatcttcttatatttgccgcagtggcattcccagtccttgctcggcccgaagatcttctcgcagaataatccgtctttttcaggcttcagtgttctatagttaatggtctcaggctttgtaacttcacccctggaccagtctaatatcttctcaggtgatgccaaaccgattttgattgcatcaaaagtcattggctgatatgattgttcattactgtttactggcatacaggcaccccttcctattcttcatctaattccattgcaaattcttcagtttcttcaaattccacgtcgaagtcgtcttcctctgcctcttcttctacatccacaagctcttctccctggaattcctgctctgtatatccttttgcaccgagattatcttcctcgcggtaatttctgtctccttctatgagagaatggaagtccgtctcacccatatccactgtctccatgatctcaacttccgtgttgtcatcacgcagcacgcgcacatccaggccaagtgactgaagctctttcagcagtaccttgaaagattccggtatgcctggttccgggatgttctcccccttgatgatcgcctcatacgtcttgacacggccgatcacatcatcagacttaaccgtcaggatctcctgcagtgtgtaggatgcgccgtatgcctcaagcgcccacacctccatctcaccgaaacgctgtccgccgaactgggctttaccgccgagaggctgctgtgtaacgagtgagtaaggacctgtagaacgggcatggatcttatcgtcaacgagatgatgcagtttcaggtaatgcatgtgtccgatcgtgaccggactgtcaaagaactctccgcttcttccgtcacggagacgcaccttgccgtctcttgagatcggaacacccttccacagttttctgtgttcacggttgtctgacagatactggagcacttccggaagcaggtcttctttgtgcttcttctcaaattcttcccagctcagattaacataatcatttgccaggtctaacgtatccataatatcaatttcgttcgcgccgtcgaatactggtgtcgctatattgaaaccgagcgctttcgccgccagtgacagatggatctcaagcacctgcccgatgttcatacgggaaggcacgccaagcggattgagcacgatatccagcggacgtccgttcggaaggaacggcatatcctcaaccggaagcacacgggaaacaacacccttgttaccgtgacggccggccatcttatcgccgacagagatctttctcttctgcgcgatgtagatacgcaccgcctgattcacgccaggggagagttcatctccgttctctcttgtaaatactttcgcgtctacgacgataccgtattcaccgtgcggcactttcagggaagtgtcccttacctcacgcgccttctcgccgaagatcgcgcgcagcagtctctcctctgccgtcagttccgtctctcccttcggagtaacttttccgacaaggatatctcccgcacgcacctccgcgccgatgcggatgatacctctttcatccagattcttgagcgcatcgtcgccgacgcccgggatatcacgggtgatctcttccggcccgagcttagtatcacgggcttccgcctcatattcttcaatgtggacagatgtatacacatcgtcctgcacaagtctctcactcagaaggacagcatcctcgtaattgtatccttcccacgtcataaagccgatgagcggattctttccgagcgccatctctccgtttgaagttgacggtccgtccgcgatcacgtcgcccgcctccacacggtcgcctttgaacacgatcggccgctggttgtagcagttgctctggttgcttcggaggaactttgtcagtttatatctcttcagagagttgtcatcctgacggatagtgatctcattggaagtagaacgctctaccacaccgcctgcctcggccaccatacacacgccggaatcgacagcagctttttcttccataccggtgcctaccacaggcgcctcggtcataagaagaggcacagcctgacgctgcatgttggaccccatgagcgcacggttggcatcgtcgttctccaggaacgggatcagagctgtggcaacagagaataccatcttcggtgacacgtccatatagtcaaatcttgttctttcatattcctgtgtctcttcgcggtaacgtccggatacattcttatgaacaaaatgtccctcgtcgtccagcggttcattcgcctgagccacatggtaattgtcttcttcgtccgccgtcatatacacaactttatccgtcacgaccggattatccggatcttcatgactgatctcacggtacggcgcctctacgaatccgtactggttgatccttgcatacgttgcaagagagttgataagaccgatgttcggaccttcaggcgtctcgatcggacacattctgccgtaatgtgaatagtgaacgtcacggacctcaaatccggcgcggtctctggaaagaccacccggtccgagggcggacagacgtctcttgtgagtcagctcgccgagcgggttattctggtccatgaactgtgacagctgtgaggaaccaaagaattccttcacggcagctgtgacaggttttatatttatgagtgactgcggggatatcccctccagatcctgtgtcgtcattctctcgcgaacaactctttcgagccttgacagaccgatcctgtactggttctgtaataattctccgaccgcgcggatacgtctgtttccaaggtggtcgatatcatcgtcattgccgagaccgtattcaagatgaatattgtagttgatcgaagccaggatgtcttcctttgttatatgcttcgggatcagatcgtggatatctctcttgatggcgtccttcagctcatcgatatcgcctgccgtctcctcaaggagcgtttccagcaccggatagtagacaagctcggtaacgcctacttccttcgggtcaatgtcaacgacagaggcaaggtccaccatcatattggagagcaccttgatattgcgctcctcgtccggtctttcgatccacacgaacggtgccgccgcattctggatagcgtcagcaatctctcgcgtcaccttcgtccctttttctgccacgacctcgcctgtcagagcgcttttaacatcctctgcgagcacctggcccgtgatcctgtttttcagggcaagctttttattaaatttatagcgtccgactttcgccagatcataacgtctcgggtcaaagaacatgctggtgataagactctccgcgctgtccaccgcaagcggctcgcccggacggatcttcttgtaaagctccagcagtccttcctgatagtttgtcgcggcatccttttcaaagctggcaaggatcttgggctcctcgccaaacagatccacgatctcaggatttgtaccgatccccagagcacgcaccaaaacggtgatcggcacctttctcgttctgtctacacgcacataaaaaacgtcattggaatcagtttcgtactccagccatgcaccacggtttgggatcaccgtagatgaatacagtttcttacctactttatcatgcgcgatcgcatagtagattccgggtgaacgtactaactggctgacaattacacgttccgccccattgataacgaacgttcctgtacttgtcatcagcggcaggtcacccataaagatttcatgctcattgatttcatcggtttccttgttgtgaagacgtactcttactttcaaaggtgccgcatatgtcgcgtcacgttctttgcattcttcgatcgtgtacttcacatcatcctcgcacaatgtaaaatcaacaaattccagactcagatggccgctgtagtcggcgatcggtgaaatatcatcaaatacttcttttaatccttcatccagaaaccactggtaggaatctttctggacttcgatcagattaggcatctgaagaacttctttttgtctggaatagctcatgcgtgaactttttccgcttttgataggacgaattctgtttttctccatattgacgtttcactcctcatatattttttgggcgggctacgagttgcccataacatactgctgattcagtgaaaccgctttattcaagccatttcacgcgatatcatggcataactttccacaatagcgcattttttactatagcacatagaatttgagcttgtcaaccaaaaactgtaaaaaaagcggcaatgcgctgattttaacccacattaccgcttcttaagccggcccctccgagaaccggaccggccgaatcactttcttccttatataaatggcatgctgtaaaatgccttttctccacttcccgaagctttggttcctcatacctgcacagttccattgcccttgggcacctgccaaagaatgggcatccgcttcccggaccgatcggacttggcagttctccctccagaggaatccgtttttttcccgcctcggcttcaggatccgggatcgggaccgccgagagaagcgcctgtgtatacggatgctttggattcctgcagagcaggtccgccccggcggtctcgacgattttaccaagatacatgacagcggtgcggtcggatatatatttgaccatcgaaaggtcatgcgcgataaacatatacgtaagtccccgctccttctgcagctttatgagcagattgacgatctgtgcctggatggagacatcgagcgccgatatcggctcatcacagacgagaagctccggctctaccgccagcgcccttgcgatcccgatcctctgacgctgcccgcccgagaactcatggacataccggtccatatgtccggccaaaagcccgacagtcgtgagcagttcctttatcctatccgcgcactgcctcccgctgtccgccattttatgggcaagcattccctctgctataatatccctgactttcatcctcggatcaagagaagcatagggatcctgaaatatcatctgcacttcttttgtaaacctttgccgctctttccctctcagtccgctaacgttccttcctttatacagcacttccccctctgtggcatcgtatatccccatgcacgttcttgcgcacgtcgtctttccgcagccggattctcctacgatgccgagcgtctcacctttacggatacagaacgatacatcgtccaccgctttcagtgtctcgtttttccctgttttaaaatatttttttaaatgtctcacttccagcaaatgctcttccatgatcgtatacatccgcctttcttctattctctcccgccttacgccatcggatggtacagccagcacctggcgcggtgtccctgtcctaacgtataagccggggggctcctgtgtccgcaaaggcgcatggcgctttcgcagcgctcataaaaggggcagccctccggcggatagatgctgtcaggcggagctccttccacaggtgtcagctcctgttcccccatatcaagcctcggcaccgccttcagaagcgccttcgtatacggatgccccggatgatagaagatatccgaagccgtcccctcctccaccacttcccctgcgtacatcacaatgatcttatccgccatatcagccacaatgccaagatcatgcgtgatcagaagaaccgtcgtattccgttcactctgcagtttcttgagcaattggataatatcggcctggatggtgacgtcaagcgccgtcgtcggttcgtccgctataacgatcttcgggccgcacacaagggcggccgcgatcatgacccgctgccgcattcctcctgaaaactcatgaggatattgatgcatccgcttcccgggttcgggtattccgaccattccaagcatgttttccgcttccgtccacgcctgctttctgtcggcgctcccatgcaggagcacgttttccgctatctgcctcccgatcttcatcgtcggattgagcgccgccagcgcatcctgaaatataatagaacattccgcgcccctgtatgaccgccactctttttccgtgtagtcaagaatatcctttcccttataccagatatgactggctgccttgatctttccgggcggtgtctgtataaggcccattatgctccttgccgtgacagatttcccgcagccggactcccctacgacagccagtgtccctccttcatccgcagtgaaagacactcctcttactgcctgtacctctccggcgtaactatgatatgaaacgcgcaggttctccacctctaacagttttctcatcttgccacctctacttcgttaatttcgggtccaatgcgtgctgcagcatgtcgcccagtatgttaaagcacagaaccgtcacaaggatcaatacacccggcacgacagccagaagcggctcatgcagaatatacttctgtgcgttctgaagcatgctgccccacgatgacatgggaagctgcaccccgtaaccaaggaaactaagcgcggactcgtccaggatagcccttgcgatactgatacttgccgatacgatgatctgcgaagacatattcggaataatatgtctcatgatgatcctgacgtcgctgacgccaagacatttggcggcgatcacaaaatctctctgcttaaggctcagcgtttcagccctcacgaccctggccacactcgtccatgaaaagaatgccagcatgagcacaagtaccggaagacttggctgtataaatgcgtagatgacgataataaacagcagattcggtatggaaagaaagatatccacgatccgcatgaggactgtgtccgttttcccgcccacgtagccgctcacggtgccgagcagcgtgccggcgagaacagatacggccatggccgcgaaaccgaccgccagtgacactcttccaccgtacagcgccctcgtgagcgtatctctgcccaggtcgtccgtgccgagcagatgtcccggcccgggtccctgcagcgcattttgaatatccagcgcgtccgggtcatatggagacagcggcgccaatacggcggacagcagaataagaagcagcgccgcgatgcacacggacgcaagcctgttctccttcagaagatactttatgccgtaaaaggaatttctgctgcggaaatcatcttttctgcccctctctttcggggcgggacggaagtcttcctccgtaaataccgcttcaccgttttgaaccatacttttatccatggcgcacctcatttccccgcttgatccgcgggtccgcaataccatagagaatgtctgccaggaaattcccgatgagcagtatcgtacaggacagcatgatgattcccatgatcatcggatagtccctgttgttgatcgcggtcatacagagcgttccaaggcccggccagccaaatacagactccacgataaaggaacccgtgatgagcgttccaaagttcatgcccgttatcgtgataaccggaagaagacagtttttcaggacatggtgccttaatatccactgctttgacgctccttttgacgctgccgtcatcacatattcttcctccagctggctgatcgtgttggaccttatatagcgcacgaacactgccatattattgaccgcaagcacgaccgcagggagcgctccatgccaaatgacatcagccgcggagtttactcccatcgtccgcattcctgagcttggaaacagccccagtcttaacgaaaacacaatgatgagcagcagtgcgaaccagaacgaaggaagcgagatgccgacgtagctgaacccgcttattatattgtctatccatttattcttgtgtgtccctgccgccagtccaagcggtatcgccaggacgagcgacaacaggagcgcggcgcccataaggcccacagtcccgggcaggcgctccagaatctgcgggcggaccggaaggaaattatttaacgatatcccccagtcgccggtcagtgtctttcccgcccagctcacatactgatgcacgacatttcccgtgagccccaggtcttccctcagcgtattcagctgctcctccgacatcttaaagcttgattttccgggcgacgtgtacatgtagagagggtcgccgggtgcaaaatagatgatggcaaaggcaaacatggatacaagtacaaacacgagggccatctgcagtatacgttttaataaatatctcttcatcggtctctacttaaagctcagcttagtataatcttcaaatacggggttcgtctgcagctcgtccgctccctcaaggctgctggacgtcgcgaacacataattcggatatgcgatcgggtagatggacatatcttccaccgctttttcctgcagttctttgtagattcctgcccgctctttgtcatctgccgcggcgcgtccctgtttccacaagtcaagctgatcttcgctcacctccagatttatgccccacgttccgtcaaacatgcctgatatgacttcgtccggatctccgaacgcaccgtatccgttaaagtacagatcatagtctgacgcatccccgaatacgcggtcaaaaaatccgttggactccataccctctacttccagacggatccccacatccttaagctgctgctgtacaatgagggccgtctctttcatgaacgctctgtcctggttatatacaagcttcagcgtctttccgtcgagccccgtctccttcacgagcttctctgctttgccggtatcctgttcatatcccttgatatccttatcatggtactgcgttgcattgctgaatatggtattcgcggccgttcccatgtccgcgccgtatgcgccttttacgatctcttccccatccagcgccgcataaatggcttcttttactttcgggtctgaaaatgtatcgctgaatttattgcatgcaagataattgacacgtccctccgggaaagtatgcaccgtgatatctttatctccttcatacatatctgccgccgcctggctggatacttccatgaagttgatctcccctttctgaagggcaacttcctgggcgctcgtatcaggtatgaccttgtacacaactttatcgatggcaggtctgtccccatagtagtcgtcaaaccgttccagctccagatattcgccgttcttaaattccttcaccttatagggtcctgaaccgatccccttcaggttcgcctcggaatttgccttgatgtctgtgtcattgccgtacacatgcgccggaaggagcggcagcgttccaagtatcgtcacataggacgccgaaggctcaggcagcgtgatctctactgtcaaatcatctgctttcttatagctcaccggtctgtcaccgatatataccgcattggcataaccggctccattgtcagggtccgcattgacatcgagtgaaaaaatgacgtcgtccgctgtgatcggttctccgtcgtgccatttcagatcctctttcagcttcagtgtgacagtctttccatcatccgacagttccacactgtccgcaagataataccgtgtctctgaatcggtcttcatgtagagctcgtcgtacactgcgccgagcatgagccagccttctttcattgtctccagatgcttgttcaaattggtgactgaggacgacactcccatcacaagttcatttttacctgatgtctttttatccggttcggaagtcccggccttttccctgccgccgcatccagcgagcataaccgccgccattgccagacaaagcagaccactccatgatctctttttcatattctcctccttgtgctttgttgttcttcttttttcgtcttctgttattgttccctcagttgacagaggcgtatacaacatgtgcattatatgggccggtttttttgatgtcaatttaagcttttattattttaacgcagtaaatttagtatttatttttaattttatttcttttttactgttattttgtcttttcatttttatatattctttctgattgattttgcaaggaaaatattctgtatatattgataattaatttctatatccatattcacatataaaaaatatctatagaatttacatataattttattgtatatattttccaattcatatattttatctatgattttgcagtttttttataaaaaaaagagccctgtggcattgggcggcccccaataaagaagtattgttacagcgagcggcatagtcattttggctatgccgttttgctgtttgtttcgttggtgtccggtagttcaatcataccgacacagttatagctgatttccacctgctgaacacgcttgccggtgctcttgtccggggcgtggacaatgattttttccacaaactcgtttaagatggtgggggtcagcttttctatctcggtgtacttcttgacgatggcgaggaagcggtcaaggttcatggcctgttcctcctgccccgtcagctccgcttgcaggatagcaaccttttcttgtaaatctttctgttcggcttcatacccgccggacagctttgcaaaccgttcgtcagagatttttccggcaacattgtcctcatagagcctttggaaaagcctgtccaattcctccatgcgccgctgggactgcgacagcccccggcgctttgcggagatttccttgcggcggtctgccgccgatttctcccccatagactggacaaactcgctttcgtattcccgcacatactggactgtcctttgcaggtgttccagcaccagcttttccagcaccacggcccggatgaagtgggccgagcaagtccccgtgttgctcttgtagttggaacatacaaagtggtcttgccgttcttcgaaatagttggttgtgcagtagtacagctttgccccgcagtcggcgcactccacaagcccggaaaacatattatgcttgcccgtctttgtggggcggcgcttgtttcttgcggagttcctgcaccctgtcccattgcgcctgttcgatgatggcggggtaggtgtcgggaagcacctgccatttttccggctggttcttgatacgcttcttgctcttgtaggacttcttcgtgcctttaaagttcaccgtatgccccagatattccatgcgttctagaatggcggcaaccgccttgttgtcccaatggtaggggtcggcgggtgtggggttgccgacgatcagcccgtgggcttcccggtaagcggtggggttcagcacctgttctttccgcaggcgctttgcaatctgcaacggcccaaaccccacaatacaaaggctaaaaatctcccgcactatcttagcggcttcctcgtccaccagccaccgttccttgtcctccgggtctttcctgtacccataggggggattgttgcacagccgctttccggcgctgctttttgcacgccacacggcccggattttcttgctggtgtcccttgcataccattcgttaaacaaatcccgcaccgccaccatatcgtccagccctttgagggaatcaatgttgtccgtcacagcgatatagcggacgttgtgttcgtccaaaatttcctctaaaagctggcctatcacaaggcggttccggcccagccgggagtggtctttcacaatgatggcttccaccatgccgtcctccaccagttccatcatttcctgataggcggggcggtcaaagttcgtgccagaatatccgtcgtccacgaaaaaccggggattggggaagtggttttcttcggcgtatctccataaaatctctttctgatttacaatactgttgctatcgccttgcagttcatcgtcacgggaaagtctgcaatacaaagcggtaatcatgtccggctgtccgtgacaaggatgttactggccgctgtcgcttaaaatgagccgttttactttagcaaccatatcctcctttgcccgttcattgaagcgggaggaaacgatataggtagtgccgccgatccgccgttgcagcgtgacgggcggcacggattttttccgtggttcatttttttcagtttgactttgattgataggctgtcacctttcctttctatcatgctgctgccgtttcagttccgccagcgcttccggtggaatacggtcaagcacccgctggatattgtgcagttcgctttccagtttcgcccgctccatcgtgtctttcagcttgcccttttcgctggcctttgcccttgcttccagtttcttgttttcttccagtaaatcggtaatcgtcactttgtactttttgagctggccggagaagttctccatcagcgggaaccactttttcaacatggatagggcttcctctttctcctttccggcgttcagcggattgataccgtccagcgccgcttcaatggctcccgcctgtttggagagggaaaccgcctgcttgaaaagtctagtgggaatatacttgcggcccgtcttgctggcgctttcgccacgctccaagtccggatatttctccaccatataggcgtgaaaatcgtcctgccatttggaaaggctggcccggttgcctaaaatctccttggcgcacaggcggttatcctctgtcagcggaacgaaagtcaaatgcagatggggcgttttttcgtccatgtgtaccaccgccgacacgatattctcccggcctacccgctggataaggaagtcagccgctcgctggaaaaaggcttgtatttcctttgggagcttgcccttaaaaaactccgggctggcggttatcagcgtatctacataccgggtactatccttgcgcgtcctgcacccggcctgttcaatgcggctctaaataaagtaatagtagcggccctccggcttgacaatatggaaattgtacttgctctttgccgtgtcaatatccgggttactggcgtacttttctttctgtcgttcgtgtgggcttccagcggccttgccgggttgcccttgtgctttgcaaatcgcaaaattgcgtaatgcggcaatctctatcagacctccttttgcggacagttcgggggcggttttcggggcggggcgtataaacacacagccccaccccgaacagcccggaaaagtccttaatttatgggcttttgcctgcccctatttgtccgtattccagcggcgtttcttatcgctggcgttcttctgccgcctatgtacctttgcggcacaggctgcacagtatttcgcccggttggagcgggggacgaaagccgtcccgcactctgcgcaccgcttcacgctgccagaatgaaaaatttccgcttccagcgccccgtcctgcggcaacaccgcccgccagaaccagatacagcagacggaataagaaatcgtctgcggacaggtgcagttgtccccatcgtccagtaacaggcagttgccgttatcgtagttacagcaggtattccgtatgagcgcgttggcccgttacctctgcgtcgccgtcatgcgggacagggaaccgcccggcccgcgctcaattggttgtagtttctctttcatgctggcctctgttttcgctctactgccgttttcccgaaagccgttcctgccccctcccggcggcgtgtcccggcgttggtatgctggcctgcttcgggccaagttggcccgaagtgatttctggacattttgtccagaagcggcgtcatagcggtacttcccttgccggtggtatctctttcggacggtcatttacttgtgcttgtccatcgatgaactaacacaagtctacactttttttaccgcccgtcccgtatatccgaaaggttggaaataccgctgaaaaacacactatttcaacactctcggatatatggtaaaataaaaatacagaacgataaatgaggagatggtgatattgaacggacgagatgtacgggtaggagcgagcctgttagtaggcgacatggacaatatggttcggttctacagagatactttgggttttcatacgaagtggaacggtggagattttgcagaatttgagacagctagtggcgcactgtccctgttcatgtacagcagaaaagagtttgtaaaggcaatcggggaaggctacattcctccaaagggaatcaatcagacgtttgaaattgctctctggttgcccagctttgccgatgtggatacggaatatgagcgattatcgaagttgggcttacgatttcccacaggagaacccatcacttatcctttcggcatccgcaacttttatgttgccgatccagaaggcaacttgcttgaaatcggcagcacgaacgaaacgtaataaaaatacggtcttttattgataaggcacactttcaatttcttattcattattgagttagctagaaggggatagcatggctttgacaatacaggaacgcttgaaagacctgcgtgtggagcgtggcctgacgctggaacagcttgcgaagcagacgcacctttccaagtctgcactgggcagttatgaagcggacgacttcaaggacatcagccactatgcccttatcaagctagtgaagttttacggcgtgaccgccgattatctgttggggctgaccgaaacaaaaaatcactcaaacgccaatcttgcagacctgcgtttgagtgacgaaatgatagacctgctgaaaagcggacgtatcgacaccgccctgctttgtgaattgacggtacacccggactttgtgaaactgctggccgacatacagatttatgtggagggtatcgccgccacacagatacagaacctaaacgcttgggtagacgtggcgagggctgaaatcatggagaagtaccagccgggagagcatgacaaaaccgctggtgtgctgcaagctgcccatgtgcgggagggtgactatttcagcagccgggtacatcacgacattgacgccatcatggaggacatacgggaagcccacaggggcaggagcgacagcgccccggagaatactattgtggacgaactcaagcgggatttggaggaagtggcgagcttcaagggcagccgggcggaacaactgctgatggtgttctgcaagcagacaaagctgcgctacaacaagctgacagaggaagaaaaacaatggctgacacgaattgtccaaaaatccgaattggcgaaaagttatgtaccacagcgaggaaaaagaaaatagcaagtacgccttaggcggataaggcgaacgaaggaggtaatataatggcagagctatttgaaacatttccatacctgagaaatgaccatattatcatcaggaaaatggttgaagatgatgtggacgaccttatggaaattacgaataatcctaacgtctatcaatatgtacctccattcctgtataaaaagagcagaggcaatttgcttgctgcaattagaaacttgggcgggagagatttcgataaaaagaaactgattattgcaggcatttatctgtgcgatgaacctaataagctcatagggcttgcagaactgtttgattataaaaaaagaatgaaccaaataacgattggctaccgcataaacgaatcatattggcatagagggattgcgactgatacagtaaggcttataatggattacctttgtaatgatttgggcattcaaaagttgaaagcatttgttatgcctgaaaatgtattttctgagaaagcactaacaaaaaatggttttctaaaagaacccattactgttcaagagaaaaactggggtggtaaagaaatcgtagatttaaatgtgtttacctatgcagttttatagggtttagttccagtatgtcttatggaagaatacgtactcaaaaatcaggagttgatttgtgcgtattaggcggataaggcaaaacaagatttaattagtgaggtagcaaaatgatattgagcacggagcgtcttgaattagtcccactacttccctatcagttaagattatgggtggaggacataccaaaactggagaaagacttaaaatgctcttatcaagcagagccaatggaagggctttttctcgaaatcgtaaaagggcaattagaaaaaacagaaaagaatcctaacgatttcttatggcatagcttttggcttctgatacgcaaaagtgaccgggttgttgttggctctgccgatttcaaggatactccgaatacggatcaagaggtcgaaatcggctatggattgggaaaagacttcgagcgcaatgggtacatgacggaagcggtacaagccatgtgcaagtgggctttggaacaagaaaacgtgtcccatgtcatcgctgaaacggacatagacgggtttgcctcacaacgcattttaaaacgctgtggatttattgaaaaaggacaggaaaaaacaatatggtggcaactataaatatgctgttgagtgtgccttattgaatgaagacgtactcaacaaatcggaagttgtaaaggaggggtagcaatgaacttagcattatggatagctataggaacagcgatactttgtgctggtgtagctatatactatggtacaaaaaagaagaaataaattctgatttgtctggctgatatagctaagccttattgaataaaggcgtacttacatagctggggaaatagcaaagccagcgggacagagggcggcggtcaaggccgggtgcaaacccgttcatttcagccttgacggttgccctctgtcctgctattttttcgggagtgtggccacaagttcgggacattttgtcccgaagtccggcgtgggacgatagacggggggctttcatatacgccctgtctgctgatgtaaccagtcctgcgcttgcggttttacgccctgcaagcacagccctgttttcctgccacttcaaatgcccttgccctccccggcggcaacggcattttcacggcaacgccgacagagcgtataacacactacactttgcttcgcaaagtcgtgtgccaaagggtgcccctttggaaaccccattgtgagggccgtggccctctcaatgcaaaagacgggctatcagcttaccgccgatagtccgtcttttgttgctacattccgcttgccgactgcccagtctgaatgtttctcaatacttccttattgggtgtcagccttggccggactcctttttcttccctttttagatcgggacagttccctgtacttcttttatatgctgtaagactttttattcttctcttttgcatacggttctgtagacaaccgccgcgatcaccgcgccaagaagcggtgccgcaatgaacacccacacctgtgaaagcgccgtgccgtttccgacaagcagagcaggaccaagacttctcgccggatttacggaagttcccgtaagcgggattccgagaatatgtacaaacgcaagtgtcagaccaataacgatcccggccactctgctgttctccgctttggcggtaactcccaggatcgtaaagacaaacacaaatgtcaaaatgacttccacgagtattgcccccggcatactgaggcctgtataggaagcctctgcaaatccgttctgtccaaggccggtctctgatacaggacctagacccgtacagctgatgacaccgtacagtatccctgcccccgcgatacctcccagaaactgtgccacaagataccccgcaaagtctgcggcgctcatgcctttatttaaaaatactcccagtgagaccgccggattaatgtgacacccggatacatcacctatcacataagccattgccacgatagaaagcccgaaggccatcgctattccaagaatgcccagcgtcccgtcgatcccccctgacacagccgccgaaccgcagccaaacagagtcaggactgcagttccgataaattctgcaacatattttttcatgttcttcttcctcctttgtacaactgacacatcggtcacatcgtagtacagcatatgttgcatgtcaacaaactgaacacaaaccgtctttattttacacaatcagaacggccgtcttttagttctcttcctcttccgctataaagcttttggacagttccttctgtgatctgttaaacttgtccgctctgcgcttctcccattcgcttgcctttttggcctctgtcggttcgtttacgacaacctgcgggaatggtatgttgatatcatatttgtcaaagataagcttcatctcccggttcaggtcacggcccatctgtaccctgtcactctctgtacaaagcaccatgacccggatcacaacactgctttctcccagctcaataacgcctttgtagaatgggccttcaataatattagtcagacgctttctgatattcgggaattccttctccagaatattttcgactctttcgagtgattcaccgtattctattccgacgtcggcccacgagtatgaatactgccttgtcatgttgatgacgccgctcacctcgctgttgctgattatcttgatatttttactcgggtcctcgatctttgtcgtgcggatgccgatctcaagcacggtccctctccagtccccgatcgtaacgatatcgccgacccggaactcgccttcaaagataatgaacagaccggccagtatatcggacacgagcgtcctggcgccgaggccgacgacaagtgtcaggataccggcggaagccaaaagcgtctttgtgtcaacgccgatcagagccagacagtagtacagaatggcaatgaccgaaaagtatttgataaagctgtgcagcagcctgcataccgtctcgcccctcgcaccgaatgtctttgacagcatgcgcagtatggcctggacaagtaccgttatgacactcacaacgcatattataaggatgcatcctgtgagcgcgaagatgttcactccccgctcccattctccgttcaggatatacaggaaaatggaattgctgccgaatattttttctttcatcatgaccgccatgcagatggccgcggccaaaacccccagtatcatcttcagcactgtggatatctgctgctcaggcgtcttttcattccaccggatggacacagtctcccagcgactttccgcggtttctgtctttctcacgcttccgtcaggcatgacgacatcaatgttccgccttcctgcgccgtccttaacggcatctgcttcttcccgtccgcttcggctgagtgtgagcagaagaaagacaaacagaagacatatgaagctgacggcgccgcacgcaagagttatcggcagacgggcgcctgtcatggcgtcttttggcacaaccacatagatatagtcactttttgtttcgagtgatgagccgtaatatgtcttgttgtcaactgttatataatcacagtatgcatctttaaactgctgcttttgcatgccgtaggagaccgcgcttcttcccgtcagcttttcctttggatagtacgcaaaggtcttatcctttttgtccacggcaaatacaaagcctcccttgcctacttttgtcttctccagcaccttgtctatctgcatattagataaggtctccttcagcttggacggcgtgacagatatctggacaaatccgtttgcatctcctctgtcgtcccgcagcgttactccaatatactgatgatagccgcctgatacctcgtcggtctgtgcgtcctgaataatgtagtccgcgccattgagcagcttattaaattcatacgactgatcctcaggatccccgctgagcttgaaattcgtgtaaggggagctggtagccgtctgcacacctgccatgtcgaacacattgaccgcctctacgtcgagtgctttgcttaattctacaagcgcatccttctgtgcaagtccgggatcttgactgataatataggaggcgatcctgcccttgttcaaataccttgcattatactgctctgtcgtctcatcgatatctttttcataatgcttcagtgttttctccacctcagccacgcgctcattgttccccatagactggcgtgacagcgcgaacaatgtctgcatataaaacgttatgatgaggataaaaataagtcccaccacggaaatagtacctattttccgcccgatcactctgtcgtagcagaattttccccacgcactggagccggcctctttcttcccgctcttttctctgtccttcatcataaatatggaatatgtgatcacaagcgtcataaccgcaaagaaagcaaaaagtattcccgcaacggtaacgccccgcgaggaaattatttccttctcacttacagcacatatgatataggcatcctgctgcttcgtgatcccgcagtaaaacttctcaccgttaacggtcagccatgtatagttgttgtcttccagctcttctaccggaatgcccgcatcgagcgcatccgttccggacagcttttcgtccggatgatataaaaaggtgtaatcctttcctgacacagcaaaggcgtagccctccaggcctacgctcacattgcccagaatacttttccatgtggaagtctcctccagaagcttgtaaagctcctctgggtcctgttcgatcacgaccatcctgtcatcatcgatccttgagccataatagcggagacttgtctctttgttccgtacttcaaaggcttctgaagcctccgctgtatcaaatacagtgcgcagctggttatacctgctgcgggtaaagtccgccggcgattcctgcgccgatgcgaccttatttccccggctgtccacaacgagcacgttcgtgacttccagcaggctgcggtactccccaagtctgccgtctgtatattcatcggctgtctgcctctgatacatgtaggacagactgtcagcctttgatctgtaaatgtcatcgaaggacacggtgatctgatccgctgcttccccggcgcttttgagcaggccgctcatctcatgtactttatcttctgtatttttcttctggtcgttcacggatagatccgtctgcatgctgagcaaaaagagcccgagcaggacgagacagataatttccgccccaacggcaagaagcgcttttctttttaatttcccagacaactttatccctcctaatcccatttatcgatcagccgctcaaccgtcccgtcgtccagcatcctctggacagcgtccgcgaccggaccgctcaaatctgaatctttccgcgtcgcaacaccgtattgctgctcggcgaccacaacgtccaaaaactcacggttttcattcatatatgtgcctgcgatgcatttgtccatgcacaccgcatccacagcgcccgtctcaagcgccgtatccagatctgaatatttcgcaaccttcacgacgccggccccttcgtacactgtagccgtatctgtgttggatacgaccttgtctgttatgatccccaggtcatacagcttctgtgccagcagggggcctgcgttggagcctgacacaatgccgaccgtctgacctttcaaatcgtccgcgctgtgaaaaagcgcagacttctctgccataataaccgtttcatccgtataatagggcggggaaaaatcaaagttttcctttctcgtatctgcaatcgagtaggctgccacaagacagtccacctttccttcctgtagcatctccttcctgttatccggctgtaccgtgacaaattcaacctcctcataaccaagctcctctgccagcttattggcaaggtctatttccatgccgtaatatcttccggtctctttgttcagatacccaaaattcataatatcgtcgcgcactcccactctgagcgtcccgctcttctcccggccgccgcatcctgtgagaacggttgccagagtgagcagcccgcacagcagcgcgcttaaccttctcatcttcatttttctttccccctgtaatgttttcatgactgaaatattaatctgattatatttcttttatgaaaaaaaggaaatggagagcgctcatattatgcttctgttaccaaaaacgcataaattttactgtttgtctttaataactgcccctctgtccgggcagaggggcgtaaaatgaaagaggcgacttaggcagaaccggcgcggtacaggccgcgccggttctttatcagtctcttctcttatcttacattatgactttttgtacggtgccgctttcgtaaaaatatcaggatggcgcagaccgtcagagaggccagcatgacaagcaacgcggctatcggatccagaggatcgcccgtcggaacaccgcttccggtactggggctgcttcctctgccgtcgctgcctcccggaacgaacaccgcaaagggggacagtcccccgaaggtccctgtcaccgcgccgttctccaccggtactttaatgcgctccagctcccttctgtggcagtgcatcaccgtcgctgtccgcccgttgtacccggtgcctaccgggatcgtcacgtccacctcaccctggatctcccctgccgaaaggctgatatcgtacagcagcagcggaccgccgttgtctttcccgtacgcgcgtatggcatcgcaggcagggtcatcatcccccgtgtgcagtgtgccctgtttcacgttcagcaccgcgtcctccgtaaagctgcctctcactgtgaccccggtggatggatcccgaagcgtacgctcggagtaagacggcgtaaaatgggccgtcaccgtgacgtgggccgccggcatcgtaaaggtagtggaaggttcttccgcgttggcgaacgcgccgccgccggatgaggtccaccggtcaaaccgccggccggcagacggggcggcggtgagggacacactgtcattttcctggtacagaccgccctttgtcgtgtctgtgccgccggccaccgtcagccggtagccggggacaagtgtccaggtattgctgctgaccgggtgactgaggccgcgcttccatgtgtcattgtaattgctctccttcccggcagggtagtagagggtaccgctgctggcaatagaatccaacgcatcatatgctatcgcctttggagggctgtcccccacaaaggtcagggatgcaaggtggtcgcatctattaaacgcaacactctcaatggtttccaggctgtcggggaatatcacttttgtaaggctgcggcaaccccaaaacgcacttcttttaatggtcctcacaccgtcaggaattgtgaagcttgtatcagtatttccaatagggtaaataagcagcgtttccatctttttatcatacagcacaccgttttcgctggaaaagtatccgtttccgtccgcaactgtaaatgacttcaggctgaagcagtccccaaacgcaaggtcatcaacggtttccaagttctttgggaaggtaacctctgtaaggctggagcagttataaaacgcttggactccaatggtctgcagactatccgggaagactgcgccggtaagactgcggcagctccaaaatgcgctatcctcaatggatcgcagaccgtccgggaagactgcattttttaggctgttacagaaaaaaaatgcattgcttccaatcgttttcagattagccgggaaaataacagtggtgagtcttccgatgctattccccgctgatcctgccacctttatcaggccgtccatctccgacaagtccagggtggtcagatttgtccaggcactgttaatccagtagaggttcttcagataatcccagttatctccggtgagctccgtggcatctcctgtgagtgttatggtagtatacctctccttatcattgatgccgggcgctgcctccaccgcatttttcaccgcgccggggccatttccattcacctccacagtgaaggtcgtgcccgtggaaggcggctgagatgtcggagcactcttaagccctgcatttgtctgtgcagcattcgtctgtactgctttaacccgcaccgtgatccggggcgcgctgccttcctccggtgcggtatatccttcgccgggcgctgctgtcaggatataatccccgggggtctctccgtcatatgcaggcctgctctcccacgtcacaggaacattctctttcaccggggcagagactgtgctctccccgccggtctctgccccatcttcctgcgcacgtaagaccatggcctccagttccccgggcagtttcagttcctcccacgtggtgccctgcggcacctccttctccgcgttgccgtccgtcagcgcggagaaggactgtatctgcctctctaaaggaaccgcctgcgcctcagcccttgcagtcacaggcgcggtcaggccaaaaagcatcgctgtgatcaacagaagagcgagcatcttttttttacctttcattctaatacacttcctctctattttcctgttgttttttgtactgtatttttccgtctcccagatattcgggaatattgcacagacagagactttgaagtaactgcttagcagttacttcaaaggggtatacccctttgatctagctttattttgttccggtactttttaccttgcgctctgccgtatatctttcaagccctcccatgcgcggcggaccaactctgtttcacccctgcggatgggaatcagcatatcgtcacgcatgacagctttgccccgctgcaccgcgatcacatggtcaaggttgatgacatagcttcggtggctgcgcagaaagcggctgtctgcaagtttttccgtcatcccctgcacggattcatacgggttgtatgtaccggttctcgtatgcactatacaattccggttgtttccctcaatataataaatgtcggaatacgggatacgttcaaaatgccgggacaccatgatctccagtgacttttcctccccttccaacactttgagcgcacggaaaaacgcctcatccacgccctcttgttccacgggcttcagaagataatgcactgcccacacactactaaagctttgggacagatagtcctttgtagcggtggtgaacaccaccggcgaataattgccctcccggcgcagtttcaaagcagcgtccatgccggatatccccggcagaaggaaatccagaaaaaacatggaaaagaagattttctttgcagccttcaaaagctcttcagcagtgccaaattcctcaatctccgcttccacgtccttgcgtgccatcgctgtttttatctgttcacagagcgctttccgctccttattgttatcttcacagactgcaattttcattttttcctccttacgaatcattttatctggtgtgattttcgtttttttatttttctcttcaactatatcataatgcgaagtattgcgcaatataaaagaaaataataaatattataatgtagtgaattgcacttaaatagccaatttatgtcgtggtccgtgacattccgcacggaagcagccgtgatccgggcgctgccggcagctgttcccgtgcggcgtccgcggccggaatcaaggaacctcctttgaccggtcagatggcaagagcgcagaacagaatgcataagcaaaaccagccccgaatgataatatcatatcattcggggctggttttgcgtttcatccacattgacccgcagcgtcttattttattttgtcaatacggaagacactgctgctttccagccttcatattttctgtctctcaatgcgccgtccattttcggctcatattttacccgctttaacttattgaaaatgcgctcatcccacacgccgagggcaagtcctgccgcgtacgccgggccgattcccgacagttcttccgaatccggcacctgcaccgccgcctccgcaatgtcgctctggaactgcatcaggtagctgtttctcgtcgggcctccgtccacacgcagctcctccacttttaccttcgcgtccccgctcatcgcttttacgatgtccgtgatctgataggcgatacattccactcctgcccgcgctacttccgctcttcccgtcgtcctcgtcatcccgacgatggccgccgccgcgcggctgtcccagtacggcgctccaaggcccgagaaggccgggacaagatacagccggtcgtccttcaccgcctcccgcgccagcgcttccgtctcctgcggggagctgatgagtctcaagtcgtccttcagccaggtgatgaccgctccggtgtagttcaggttcccttccagcacgtagttcaccttcccgctcatgctccacgccagagaggtcacgaccccgtgggtgctgagcaccggttcttccccgatgttcatcatgatcgaggagccggttccgtacgtggactttatcatgcccggcttccggcagccctggccgaacagggagccgtgggaatcgcccagcaccccgtgtatcggcacgggccccgggagcagcccctcaaagtccgtctctccaaagtcggcgttggagtcgcacacctcggccaggttggccgggtcgatgccgaacaggccgcagatctcctcatcccagcgcagcgtgaagatgttaaagagctgggtcctcgatgcgttggagtaatccgtcttgtaggacgttctgcccgtcagtctgtagatgagccagctgtcaatggtgccgtggcagatatcgcccgcggccgccttctcctttgccccgtccacgtgttccaggatccaggcgatcttggaggccgggaagtagggggacaggttcatgccggtcctggcgcggatctgctccgcggcgccgagcttctccacccgctcacagatatccgcggccctggcgcactgccagacgatggcctgcccgagaggggcgccggtggagcgctcccacgcaagggacgtctcccgctggttgctgatgccgacaccggcgatctgctcctttgcgatgccggcctccgtcacaagccgcgtcaccacctcaatggtattgcggtagatctcctccgggtcgtgggagacccatcccttttcatttacgatctgcctgtggggcttatccgttctccggatgagacttccgctcccgtcaaagagaagggcctttgtaccctgcgtgctctggtctatgctgataatgtatttttctgacatttcttccacccctttataactctgtattcagcacttcctctttcagcgggatggatgccgtggccccttcccgcgacactgcgatagcggaagctctggccgccagctcgagaccggccggtacggacatcccctctatgatagaagagatgaaatacccggtgaacgtgtcaccggccgcagtcgtatccactgcttttactttaaagattccctgtcggcagatctcttccttatactggtagacagaaccgtcgccgccgagcgtcagcacaacctttgcgtccggatatatttcttttaatttcgcgaggatcttatctgtatcctcctcccctgtcacctgcgctccttcaatctcatttaacagaaacatagatatcttattgaagtcgcatctgtcaagcgcgccgttatacggcgatggattcagtatgatcatgagtcccttctcgtaagcagagtcgataatatagtcaagcatattgacttcattttgcagaagcagaatatcccctttctcaaagtgggcaagcacttcgtccacgtactctttcgtgatgctctggttcgcgccgccgtacagcagaatacagttctgcccggttttgtccacctgtatgatcgtgtggcccgacctgccttcgatttttctgatgtaatctgcttttacgccgccgtcacggcatgtttccaggagaatatctccttcttcgccgatcatacctgcatggtagaccgttaccccggccttggcaagggcgatggactggttcagtccctttccgccgcagaaaacattcataccataagacgccagggtttcccccggcgtcaccatatggtcgacggaatatacataatctaaatttaaagatccaaaattcaaaactttcatatacaattcctctcgattttatattgtcacgccttgctgccacaccggtgttcaacaaggcgcctgtgactgagttcctacgccgggaatgccaccccggcccttaatataatgttagggtacggtgtaaactcccctgtgcggacagcaaacttgatgtccccggacatctttttaagctccacatggcttatcatctcagcgtccgcgtcagggagcttctccctgatataggacagcagctttggatttttctctacaatttcctccgcaagcgtataagcttccacttcggtttcgccgagaaccgcatccatcacctgccggtaagtcggcacccctccgcacagagccagatctacgagctctacccctttcgggatcggcatgccgccgtctgcgatcataaataagtccttgtgcccgagacccgcgatcagccccgcaagctgcgcattaataatgcccctttttttcatacaattcacctcaatttcgataggggtcagacccctgtggccacaggggtctgacccctatgaaaattctttaaattgtctatttattttcgttccgtgcctgcagtgccatctttgcctgaagattcctctgtacctggtcaatgatcacggcgatgatgatcacgagacctctgatgatcttctgccagaactctgttacaccgcacattgtcataccgtcattgatgacgccgataacgaacgcgcctacgatcgtaccgccgatggttccgacgcctccggccatggatgttccgccgagtacggatgcggcgatcgcgttcatttcccaggattcaccggtctttggcgtggcggatacgagctgtgatgtggcgatgatacctacaactgcggagcagaagcctgagaatgcgtatacccagatcttcactctgtcgactttgataccggacagcttggatgctttctcgtttcctccgatggataatacatgccatccaaatggtgtcttctttaatatgagtcctgcaacgacggcgatgatggcgagtatgagaacgccgcacgggatcgatgtcccgccaagattacggccgaatacttcaaatccggtattgccaagtccttcgcttccggatatttccgaaaaggtggcgccgttggaacggatatttgcaaatccgcgccagatatacattgtgccaagtgtggcgatgaaaggcgccacattacattttgtgatgacaaggccgttgatcatacccatcagtgctccgagaagtacggtgataagaacgatcatgggaacgctgaagtataaggttacgccgaacatcttaagggtgaggccttcctgtatgagaccgccggctatcattccggccaggcctgccacggaacctacggagagatcaatgccgccggtgatgatgacgtaggtcataccgatcgcaaggatcccgtaaagcgccacgtgctttgccacggtcagaagcgcgcccgcacttaagaagttatctgctgtgatactgaagaatatgagcagaatgatcaatacaatgaatgtacggccctttaaaagggtcatcattaacttattatttcctgatttttgtttcgctgccataatttaactctccttttcctctatatgatggcccttgtaagaagccagtaccaatgtatcctgctgtatctcgtccccgaagaattctcctgtcttgataccatttgacagtacgatcacacggtccgcgatagacacgatttcctgcagctctgaagaaataactatgatggacagtccttcttctgcatacttgttgataatgtcgaacacttccgtctttgctccgatgtcgatgccgcggcttggttcgtccatgagcagaatcttcggctctgtcagaatacctttgccgataactactttctgctggttaccacctgataaggaaagaatcggcagctttttatctgccacttttatctggatgtctttgatctcttgttctactttttccgcttcctttttgctgtccagaaacggtccttttttatatcttttcagcgcggacagggcacagtttttctctatatccaatgtctgtacgagtccctgcgcctgtctgtcttcaggaatgagcgcgaagccgttgtcgatctgctgggaaatggatttgatattcaattccttcccgttcataaatacctggccggtatgttccgggtgcagtcccatgagacactcaaacacttcgctgcgtccggcgcccatcagaccgtagatcccgagaacttctccctttttaagttcaaaatccaggtggtctacgagatacccgccgccggctttcgggagacacaagtcttttacttccaggacattttccaccttgttccagtctacttcgcggtctctctttggataagattttgcgccgcctgtcatctggtggacgatccacggaacgtcgatctctttgacatccgcgtctgccacgtatttgccgtccctgaggatcgtgacatggtcgccgatctccatgatctcttccagtctgtgtgatatgtatacgatagagattcccgccgccgtcagttctctcatgatcttgaagagaactttaacttcctgctgggaaagagaagaggtaggttcatccatgatgagcaccttcaggtcgtcctctacaaggtttcgcgcaatctcgatcatctgctgctggcccacgcggagctctccgacttttgcatgcagatcaagcgggtgctccagccgctccagcacttttttggcgccttccatgtgcgtcttattgtccagggcgacctttccttttgtcttctctttgttcatgtaaatgttctggtatacgttcagattcggaaacaggctcagctcctggtgaatgatgccgattccgtgctttctggcctctgtcgtatttttaaagaatacttccttgtctccgatgtacattttaccttcatttggctgttcgatcccggcgatcattttcatcagagtggatttaccggcgccgttttctccgatgagcacatttacttttccttttaaaaggtcaaatgacacttcatcgagcgcttttgtaccggggtagatcttacttattttttctgcatggagaaatacatcgtccctgcacttatatgtctcacccatagttcatatctccttcttgttgtaaagtaggttattctgcttccagaactacaggcgtgatcagaacgtctgaacttcctgtcgatactgtaaatgctcctacaaatgagatcgtctttccctgtaaggaatccggtttcgccggctcgacaacatcctttgccaccacttcattgatgctctgtgataccgctgcccactgctcctggtttttgtaatcgccgaacttgataaagctcaacgaatcacggatggaagaacctttgtatacaggcccgatctggatcttgatgacctctgtgccgttatagccgtccagctttattgccatgtaacctgcctgggactgtgtatttacttcttctacagtgcctgacccttttacaacatagctcagttccccggaatcacccatggagtatttgccgtactcgtccgccagtgccgtcaggtctccgtttgactcctcaagaaactctttgaggtcaacggcattttcgttcatctccggaagtgccgattcttcccagatggcttccacgtcatcccctgcattaaattctacatctccggtatattttccttcttccccgatcttaacgactttcacaattccacatcctgtaagcaacgtggacgctgcaagtgtgagcgtaagtgcgagagctatcatgcgctttttcatagcggcctccttcatatcgtttattcacaaatatttctgccgaatatctatactgaccgaacttcccatgttccatcagaaatgttccgtaaccatttaatacttttccacataaaagagttgttttcatatacggggaagcaccttaaagtgcctccccgcccatgtttgtactttattttcccagcttattctgtgaaaacaaatcctgataatttgtctacattttcagatgtgatagcgatacagtcaactaactgtttctcatccagtcctgtggaaccttctttgagatacttgtcagcctgctctactgccatctcagcgataactgcgaactgctgaagagctgttcctgtagcgtctcctgatttgatcagggccgctgcctcgtcggaaccgtccacaccgataacaggaagtgtcttgccggctgcctggagcgctgcgcatacgccttctaacattgtatcgttgccgcatacaacaccttcgatgtcagggtttgcctgaagcattgcttccatcttgtcataagcttctgtcttttcccagttagctgtctgctgagctaccatctccatatccggatactggtcgatcacttcgtggaaagcggaagaacgtacgcctgcgtttgtgtcagattcttttcctaacagctcaacgtattttcctttttcacccatagcttcaacaaatttttcagcgatggcttttgcaccctggtagttgtttgcaacgatctgagagatggctacgccctcttcattgatctcacggtcgatgaggaatgtcgggatccctgcttctcttgctttctttacagcctcaactgtcgcgtccgcgccggcgttgtcacagatgatcgctgctgctttgtctgcgatcgcactgtcaaataattctgtctgtttcgtcgggtcgtcatcgtgagatgcggcttttacttcatatccaagttctttagcctttgcagtagctgtgtcagcctccgtcttgaatgccgggttggatacggatggtgtgataatataaatgatgttagagcctccgcctggtaaagcttcctcgtcctttgtgtcctctgtcttcttgtcttcctttttgtcttcttttttagaagaatcgtctgatttggagctgcatcccataaccatagctccgaccatagccactgtaagcagcatagccaatacttttttgaaacctttcatttttgttcctccttatgtttttaaaagtattaaattctctatatcaacaggcaatacctgctaatatctgaaaacttgcggaatttcgaaaggggtcagacccctttggccataggggtctgacccctatgaaaatttcccttgaaaattctacaaaacttcctttattgtctttgcaattccttctgcgtccagtccgtaatactggaacacttccttcgacgttcccgtgatgaccggggcgtccggcagtgacaggttcacgaccttcttcgggcattcgctccctactacctggctcaccatggagcccagtcctccgtacggcgcgtgttcttccaccgtcaccactgccttggcgttctgagctgcttttacgacggcttctttatcgagtggtttcacgcagtacatgtctaccaccgtcacgctgatcccttcttctttcagcttcgccgcggcgtccgccgccggcttcaccatctctccgcaggcgatcaccgccacgtcgctcccttctgtcacgaaggtcgctttatccatctcaaacggcacgttcccttcttcgtacacgtcgtccaccgcgttgcggcccacccggatgtacgccggcttatcgtccgccagcagcgctctcgtcaggcactccgtctgcagacggtcgctcggcaggtacacccgcatgttcggcaccgccgccatggccgcgatgtcctgggccgagtggtggctcatcccgagcgcgccgtagctcacgccgccgctgatcccgatgagctttacgtttgtgttcgagtacgccacatctatcttgcactgctcatagctccgcgtggagaggaagcaggccggggacgccgcgtacggcttcttcccgcattttgcaaggccggcggagatgctcaccaggttctgctccgcgatccccgtctccacgaactggtccggcagcccgttggcaaatggggtgaacgacgcgctcccgcgggagtcgctgcacagcgccaccacatctttatctttttttgccgcctccatcaggacttcacacatcacctgtttgtttgccgtcttagccatgaagcgccgcctcctttctctctgccagatcttttctgatctgcgcaagttcctcttcattcgggaccttatgatgccagtttgccttgttctccatcacggaagagcccttgcctttcaccgtgttggcgatcagcacggtgggctgtcccttcaccgtcttcgcctcctcaaacgccgcgtgcagctgatcgatgtcgttgccgtccgccacgtcgatgacgtgccagccaaaggcgccaaacctttcatgcaggtcgtcgtgtcccatcacgtcctccgtattgccggatatctgcagccggttccggtctaccaccgcgcacaggttgtcgagcttatactggcaggccgccatggcgccctcccacactgagccctcggccagctcgccgtcgcccatcaccgtgtacacccggtagtcctggccgttcatctttcccgccagcgccatgccgacgcagaccggaaggccgtgcccgagggagccggagttcatctcgactcccggcagcttgttgttcgggtggccgatgaatttggagccgaacttgctgaacgtggagatcagttcctgtttgtcaaagaagcctttctccgccagcaccgcgtagtatgcctccacggaatgtcccttgctcatgacgaacttgtcacggtccgggtcgtcctggttctcaggacttatgttcatctggcagaagtacagctctgtcaggatctcaagcacgctcatgtcgccgccgatgtggccggcctttccttccacgatcatgtcgatcacggtctccctcagcccgtaggccaatgcttttagattgctcataatcattctcctcttaaatatgctttgacgtcttcttcgatcgggtcataaaagtcaggttttacgccaatatatttacatgcttcatataataccggaacgatgtccttgtgaatacccacgcagtggtgaatgtaaggtccttccacgatctttgcctcaagccgcttgatgttttccacctctacccagagatatgtccccattcccttcgggccgtccacgcctttggcgttgccaagaagcagcgaatactctccgttgtccccgtcgaaccggcacagcgtcacatcgccgtgcttcgcctccgccgtaaggcttcccggatggtcaaatgccagcggatatgtaagctgcggcttctcctttgccaccgaaatgggccacggtccgcagtgctgcagcagctctccgttctcgatatccggatggcggatcgtccagtctgcaaagaaacctctcgtctcccccattcctgccgcttccaccataagcgccgtgatggctccatggatatctgtctcacacacgactggtattcccttgtcattcaggatagcgtttgccgcacacggcataacaccgagttccgtctgaagcgcgttccagcactggatcgccgcagcgccgcagccatacttctccacgagccgttccatcgccaccgcaagggcagccacattctccacctcattgtccttgatcttgacttccatgttctccctgatataggagatcatctccgccagtctgccgccttcttccttaaccgctttcacttcctgcgtaagctccgtcatcggaaccggggcgagctgtacattgaacttctccagcagctccccttcgttgcacatcgtcgtccagaaatcaaacggcctcgtggagatctggagtattcttatattgcggaatgtttttactacattgcacaccgccataaagtccctcagtcctctttcaaataccggatcattcaatctgcagtttgtcacatatgtaaatggaatctgaaatcttctcagcaccttcccggtggcgaacagaccgcactgcgtatctctcagcctcacaccgttctcttccgggcgctcatccagcggcccccagagcattaccggtacgtccatttcctttgcaagtcttgcgcagacatattctgttccgaagttgcagtgagggaacatgatcccgtcaacgccttccttcttgaactttgccgctatcttcttcacgtcattgtcatcatagagaagaccttcctcattgatgtcgtcgatatccacaaaatcgatccccagctctctcagtctgtctgccgtcagtcccctgtacttgatcgcatccggcgcgctgaaaatacttcttcttgtcggcgcaaatcccaatttgatagttgccatctttcttcctccattcttatgctttgctgcactgtttatctttcaatttgtctgacactgtctctttctataaattgtgtgcagacctggatcttcatctttatatctttccctgaatacttaatatggtccagcgctcttctgaccgccacttcccccatctcctgcttgaacacccgaaccgtcgtaagacccggggtggagacggtcccaaacctgatatcgtcaaaaccgacgatggaaatgtcttccggaatgcgtatccccttttccttcatggccctcatcgctccgatggctatcacatcattgtccgcaaaaaatgcagtcggaagcctgtcggtatgttccagatattttttcatgtcctggtaagccgattccagctttgtccctaccgtgacctcatattccggcttccttacaaggcggtgtctgcccatcactctgtggtaaccgtattcccggtatctgaaagactttatccggtaatcccctctcaggtacccgatctcacggtgtcctttttctacgagatattccatcgcattgcacaccgcgtccgtattgttgatcatgataccgtcaaataccatctcgtcactccatccgtccagcacgatgaggtaacctttataatcgtaaaacggaacatagtcctcttccgtcatctctgtcccaagcagtatcacaaggcagttcgtatcttccagaaactctttcagcctgatctcaaaagattcatcttcataattcagatgacagaacgttgtctcatacccaagttccttggcctgacgttcaacgccttcgatcatggccggaaatatctggctgtcatcaatgataagtccgttttttctgtatgtgacaaacttgatcttcgtgatcgtcttcccctgctgatatccgagcgtctccgcagcctttaatatcttttcagaggtaacgggattgactccctttttgcggttcaaagcatttgagacggtcgcgggagaaaaacctgtgatctggcttatcttttttatactgactttcactcttcaccgccccttaactgtttatatctgtattataaacgtttatataaattattcaatactttttatgtaaaaactccattttaatttacattttgtttaattacgatagatttaacaagctgtttttgtgtaatattaacaatatatctatcccgcatttacattttattcacatttaacgctttgttttgataaacgttcatatgaatatttatataaacatttatataaactttgtcataatatgtaaaatattgtcaatacaaaaagcattgccgcttcacaagcaccttccgaacgttattttccgctttctatgcagaacggcaccactaaaaaacagccggtcctccggctctcgttcacgatcagtgcagaacaagggccggaggaccggctgtatcacaaaccacaggcgggcggtacattcgtaccgcccgcaaacccgctatatttttctaacactcgcacgttccacaaagtccgtgcagacctggatcttcgtcttgatcttcttcccgtcctcaaccgagcgcatcagctcccgcaccgccatctctcccatctcatgcttatatacatggatcgttgtaagaggcggatccgagatcgcgccgaacgatatattgtcaaatcctatgatggacacatcgcccggtatgtcgtatcctcgttccttcagcgcctgcatcgccccgatggcgatcgtatcgttatccgcaaaaaacgcagtcggaagtatgggcgtctcctccagatatttccgcatgccctcataggccgtctcgatcttcgtcccgacagtcgcgatatactcaggctgcaccggcaggtgatgcctgtccataactctcctgtagccgatctcgcggtaacagaatgcctgtatgcgaaagtccccccgcagatatccgatatcacggtgtcccttatcgatcagatattcaaccgccctggccgcggaatctgtattgcttatcagtacactgtcaaaaaagtagcggtcactccagccgtccagaagaatgatcttgttcttcgcatgtgtgtacggctcaaagtcctcctccttcatctcagtgccaagcagcacaatggcgctctccgcgtccgaaagtatctcctgcagctgcgtattgtactctatatcgttgatatccacatggttaaataccgtctcatagccgagcgacttggcctgtctctcaactccttcgatcacagcagggtgaaacgggctgtcgtctatgatcaatccgtttctgcgaaaaatcacaaatcttattttacttattttttcttccactctgtatcccagttcctctgccgtcttaagaattctgtcagccgtctctttatttacgccttttttatgattcagtgcattggaaactgtcgcaggagaaaaaccggtaatttcacttattttcctgacgcttactttcatcccttacgaccttccatcctttttgcctccctgttttccggagtataaaaatactataacacattcaattcaaaaaaagaagggaaattccagccggtggaatttccctcctgtgataagcttttacagatgcagccctcaattacttaaggtttacttctgctccttcgccttccagttttgccttgatctcttcagcctcagccttggaagcgccctctttcactaccttcggagctccgtcaactaattcttttgcttcttttaatccaagtcctgtgatctcacgtacaactttgattactttaaccttggaagaacctgcagaaactagttcaacgtcaaattcgtctttctcttctgccgctgctgcctctccgcctgctgctgcaactacaacgcctgctgccgcagatacaccaaattcttcttcgcatgctttaactaattcgtttaattctaatactgataattctttgattgcttcaatcatctcagctgttgttattttagccattttgtttttcctccatttttatgatttttcgattattcttctgtcgcttccgctgtctcttcagccggagcttctgccgctgccggagcctcttctgacgccggagcttcctctgccgctacttcaccgccctgttcagcgatctgcttaataacacgggcaaagtttgtaattggtgactgtaagcttccaagcagtttggaaagcagttcttctcttgacgggatcttggataattccgtaagtcctgcagtgtcataaactgagccttcaatcacaccagcttttaattcaagggctttcgcatccttcgcgaacttgcagagaattcttgccggagcagtcgcgtcctctttagagatcgcaatagcgctcggtcctgcaagatgctcttccaaagcagcatactctgtcccttcaaaagctcttttcatcattgtgttcttgtataccttgtagatgatcccggcatctctgagctgcttacgcagttctgtatcctgcgcaacagtaagcccacggtagtcaacaagcacaactgatgctgcatccttgacttcatctgcaatagtctctacgattggttgttttaattcaacttttgccatgaaaatggtgcacctccttatagtttagtctgctgccaaaagaacaacgctttctatcatataaaaaacctccggtccgtaagacgcagaggttgtataaattcatagaaatcgaatctcatatcatcctcggcaggcgtgtctatcacttacgctaatcaaaagcacctgctgtcttcggcagtcatcgctttgctattataccatcacatatgaccgatgtcaataccttattttataccggacttttcccgacgcaagtttaccataatggtgctgtttttaccgtttatttccaatcccctgttcttatagtgtgttaaaataaaatcagaacttttttacttggggaggaatgccgaatgaatgtcgctgttgtagacgactcgcttttcgacagacaatatttacaggataatatcgaacgttactgttctgaacataaagttcacatgcagatcaagacttacgataacggacacggatttttaaattccttttctgttcacacatatgatctcgtttttctcgacatattcatggatgagacgagcggcatacatattgccgagaagatccggcagatagatgacagatgccagatcatttttacaacctccagccaggaacatgccatcaaagctttccggctgcacgcgcttgattatctcctcaagccttacacatatgaacagctggaagaatcactgttcagatgccagacggcgatgaaacggttttcacactacatcgagctgaaagaggggcgccactatacacgggtacttatctcagatattatatataccgattactataatcactatatacaggtccacacttcgcgaaacgtcatccgctcttatatgtcattcgcggacttcgcgccgatgctcggcaaatacccgcagtttctctggtgctaccgcaactgtatggtcaatatggattatatcagatcgatggacagcaaagactttatcctttccacggatgagcgtattcccatctcaagggcgcgcaaaaatgagatacgccaggcttatgccaactatctgtttgagtatgtgaccaaaggagatactccatgacgccggatatcatcatcagcgccctgttgttcatcctcccgtgtattctcatactgttcctcaccttttcagatcatctgagaacaccaactcatgcaacagccgccttttccatatcctgtttcatgatcatagatatggcggccacctacatatattatacaaaaccgctcaccgcatggacaatgattcttctttcctttgcagccatgctggccggagtggttttatttcgcgcggcgtccggctacagctttgcacagagtcttttttctgtggccatcgtcatgtgctatacagacagcatatatatcttttcgtcgcagttccattacatcgcggcaggcaggcttcccgacggaccgtccacactacacacggtgtcgacgctggccatatcactggccaccttcccgtttgtccttctgctcttcaaacggcttctccggccggcgctggacgccacagaaagcctcgctttctggcgaatatcctgggggatcccgctgtgcagcagactgttgtattacctgaccatttttccgatattttcgccaaatctgcctacgtcggtacaaagcgatatatattccgcgcccacactctggagcatctttacgtttttcacttatgtcattgcgcttaagatggtgacggaaacgacaaaaaacgccaggcttcaggaggaactgcatatatcagaaactcagtttgcggcacagttaaaacaatccgagatgatccagcagcgcatagaagagacgatgcgcatacgccacgatttccgccacacgctcatagcgcttcaggcatgcctggacaccaaagattatgacggcatgggagaatttataaataattatatatgcagcctggactccctccgcccgacggcatattgcgacaaccccgtcgtcaacgccatcatatcatactatgcggaaatggcccgcggcgacggcatcgccttctccgcctccgtgcaactggagcagaagctgccgcttacagataccgacgcatgcattattctcggaaacctgctggaaaatgctctggaagcctgccagcggcagacgggcacaggccggtatatacacgtcaaactccatgccgtccacggaagttcactcgttatcatcattgacaacagctacagcggtatcatccacaaaaaagagcatgtttttctttccacaaaagcgaaaaacagaaaagggatcggcatcgcctccgtcctcgatatcgtgtcaaaatatgagggtgtaccccagtttgagtatgatgcggaaacatttaaagtctccatccttttgcatcacagccgcaattgacaaaaggcgtgcgcagcgcgcaaaaaaagaaaccttatgcaaatgcatccgcatcacataaggtttctcttttttcccgtccatttggcgtgacccgcagtctctttctgctgcttcacggcttaccgccaaaccgccgacaggattatattacacaatacaattaaactaatttagccgggttgatctttacaccaggtcccatagtagaagtaagtgtcacgctctttaagaactgaccttttaccgctgccggtttagctttgttgattgcatcaataagcgtctggaagttgtccgcaagttgttcttcggtaaaggaagctttacctactggcacatggataatgttcgtcttgtcaagtctgtactcaatcttaccggctttgatctcctgaacagcttttgcaacatccattgttaccgttccggctttcgggtttggcatcaggccctttggtccaagtacacggccaaggcgtccgacaacacccatcatgtccggcgtagcaacaactacgtcaaattcaaaccagttttcattctggatctttgggatcaattcatccgctcctacgtaatctgcccctgccgcctttgcttcttctgctttggcgtccttggcaaatacaaggatcctggtctttttgcctgttccgtgaggcagtacgactgctccacgaatctgctggtcagcgtgacgtccgtcacatccggttctgatatgagcttcgatcgtctcatcgaatttagctactgcagttttctttactaatgaaacagcttcttctttgtcgtaaagatttcctctgtcgatcactttagcagcttcaatatatttctttcctcttttcattctaaaaaacctcctcgtggtaatgtcgggataaccctcccacatatttaacatttacaattagcaacgaaagctctcgagcctactcttctactttaacgcccatgctgcggcatgtgccggcgatcatgctcatggcggcctcaacagttgcggcgtttaagtccggcatcttaagttcagcgatctcctgaagctgagcctttgtgatcgtagcaacctttgtcttattcggaacgcctgaacctgatttgatattgcaggctttcttgataagaaccgctgccggcggagtctttgtgataaagctaaagcttctgtcattgtaaactgtgatcactacagggatgatcatatctccctgatctgcagttttagcgttgaactgttttgtaaattcaacgatgtttacaccgtgctgaccaagtgcaggtccaaccggtggtgccggtgtagcttttccggcaggtatttgtaacttaatataaccttctactttttttgccatttcaattacctccttgtggtgttggcgggaacgtcacacgcccctcccacttcctactacattttctttacttctgcgaaactgatctctaccggcgtttcgcggccgaataactcaacattgatcgtcagactctgcttcggaatgttcagcgcctggatcactccaaccgtatctgcccatgccccggcaattacctgaacggtatcgccgacctcaaagtcaacgacaatattctcctgcctgatcccaagcggagccatctcggcatccgtaagcggaaccggtttggaccccggccctacaaatcccgtcacacctctcgtgttacggacaacgtaccaggtgtcgtcattcatgatcatatgaatgagcacatacccgggaaacatttttttctgtgtcgccttctggacgccgtttttcagttccactacatcctgcatcggaacacggacctccagtatctggtcttccaggtgccggttttcaattgtcttatcaatgttggccttaactttgttctcataccctgaataagtatgaacaacgtaccattttgcctctgacataaaatcacctttcttgcctgcagtttatcagtgctatcttactaataaatccactccgttctgtaccaggaaatcaataactgcaataattaatccgagtacaacagacacagaaacgactgccgctgtctgttttgcaagtgtcatcttatctggccaaatgatctttctgaactctgccttaagtcctttgaaccagcttttcttctgagttttttgttcagccatgacatcactcctttgcggcgactattttgtttccttgtgcaatgtgtgtgacttgcagaatttacagtacttcttagtctccatgcgctcaggatgagttttcttatccttcgtcatgttgtaattacgctgcttgcattctgtacattccaatgtgattcttgtacgcacaacttccacctcgctttatgtttcttgtgttaacattgttacttggcagcttgcggggctgcccgattttaggcataaaaaaaagacctacttccattcgctaggatagtgtatcacacaaagccggaaaatgcaagtccttttcgtcatataactccgccgcagccgggactgcggcggagtctgtttcatgtcacttcaataatctaagcgcatttttatagaaaatactttcccgcgcttcatctgtcaggtctgccctctgaatgcggtatatctcaagctctgtattaagccacggaaaatgagagccgaatacaagcctgtcatacccgaggcgctccggtatattttcgatcccttcatcggaatagtctcccgaagtctcgatcatcaggttggaatgcctgtccatcacatgatccacatctgtcagcgcatagccgctgctgtcaaactgccctccgtgggacatgataaacgtgatctcaggaaatctttccgccagatcggccacctgaaagcagtgtgacagccacgggtatcccgtctcaaccaggacaggcaggccgtactctctgcatatctccataaaaggatataccttcttgtcgtttatcgcaaatgtctcctcccacggatgcaggatgagccctttcagctccagttcctgcaccgactcccgcagtatcttctcagaatccttcccgagattggggtcaatacggcagaaaccggcaagtttccccgcatgctttctctgcaggtccgacacatattcattctgccgttcaaagaaagggtctgtcgtcttgacgggacagatcactgagatatccacctgattttccgccatattctgcagaagttcttcttccgtactttcctgaccgagcatggatgtgccgacatatgtatgaaaatcaatgatcatttctctccctccaatcccatcacacgcaccgcgttcttatagagcaccatctccagttcttcctctgaaagtcccgccagcagtaccttcttaagctccacgagcgggtcgcagcacggcgcgtccgtgccgaaaaagatacgttccgctcccagttcatccacaaaccaccggatttcctttacgagcggcacttctgaagtatcgatgtaaatatttttatattttttggccgcctcaatggcatctctgttatgggcgtaacctcccatatgcgcaagaataatgaccgtgtccgggcactgcgcggccagctcccctatctggagcggaaggcacatcatctcgtccccgcagtggaagagaaccggaagcccaagttctcccgccttcctgcataagtttaccgtaagctccccgtatgggtgcagtgtatagtgggccggatgcagcttgactccccggaccggatacgttctgcagctttcttccagaaagtccaccgcctcttggccaaaccacggatccatgcgcagaaacatcataaaacgctccttataaggttctatggaattccagagacgctctgcgcacgtcatatccggtcccggaagattcaggtacgcgctgacgacagctttctcgatccccgcctcatccatgagcttcacgagcttcgtggcggtatcatgccagtgcagcggttcgcacacgtccacatgcgcgtgcatatctatgattctcatataagactcctttcattatatatatgtatttaaattatggaacaactggtgtttctccgaaatgtctttcagacaaacaggttacacgtacagtcttcatactgtctgatacacttttcatatatccggtccacgtacggcataagcgcgtcattcttttccaccgtatctttaaaccgctcctgaaactctcctgtcattgcctgtagttcctctatcagagcattctcatctacgttcagtatgtttctgttctccatcagaatgcgccccgccgagatcacagtctccacatcactgccgtcctcacagtagacgagatgcttgtaaatatcgtttaacggcgtaaatgcctcggacttcagatttatgaccgcaatatccgcgtcctttccttcttccaggcttcccatctcctccgttctcctcagactgtgcgcgggcgtctgaatggccattttcaaaatggatctggcgtccagccacgtcttatagtccgcatccatcaccttctgcagcagcgcggcaaactttaccgtttcaaacatgctgtacccgtcgttgctgctcatgccgtccgtgccgagcaccacatttacgttgttttgcaccatcctgcgaagcggcatgataccgctgccaagcttcaggttgctgaccgggttgtgggccacagaggcgcccgcctccccgatcatccgcatatcctcctcgtccatccacaccccgtgaataatcgtgaggcggtctgtcaggaacccgatatctttgatatgctttacaatggacgcgccgtaaaattcaggaccggtagcgcgctgcatcctcgtctccaggatatgtgtatgcatgggcaggtcatatttaagcgcggtctttagtcctctcatcaggtattcgtccgtgcaccgctgcggcgccgacgtggaaaatacaacacgcatgccgtcctttctgtcccaccttctgatcacttcctcatacgtctctatcatctcatccggatccgggtgcgaggaaagcagcccgtgatactgtccgggaatacagtcttttgtatacggaagcctgtccataaaggcgcggtctcccatatttactgctatattgccttttaagccgatgtccttatatgcctgaaatacctggtcgtacccttttaccgtggctttcgggcactccgatacgtcatcctgcacgcacgttattcctttcttcaccatctccatggccccgatcatcgtgcgcagatatatgagccggtgggaaaacggaccataatccagcggcgggcagctgtacaacatccatggctccagcggcaggttgtcgaagcgtccgcggaacatattttcatccgagtgcaggtgggcgttcacgagcccgggcatgacaagcttatctgtacagtctatgatcttgtccgcgctttcttctatccggtatcctattctcgttatcttcctcccttcgatcagcagatccgcacgttccaatattttgtcctcaggatcaaacgtcagtatctttgcgtttttcagtaatattttcatcctgtaacctcctatgagaataatttatatgcatatgcctccatgcaaagcggcatcaggtcgtccatcgtttccagatcgttgtacaaaagttctttgatcttgttcagccggttgatcaatgtatttctatggatgtataatgcctttgccgtctcgctgacattaaacttgtgctccagaaatccaagcagcgtgtgcacaagttctgtattgttttcttcatcatattcctgcaggcaccggatactgtcgcagcgctgctcctttgtctttaccggatactgcagcagataatcgtaaaactccagctggttataggcaaagacctgttctttcatcccaagcttttccccgatatcaacagccttttccgcctcctggtatgctctttttataccgggaaagtcgtcgctgcttttcccaatgccgatctgcacttccatcccgtcatttatgcggcccattctctccgccatgatgcctgccagttttccggccgcgttgcacatgaacggatcgctcttgtccgtacaggcaaaaagatagacgatgaacttgcggccgcggctcagtatatagggctcaaatccgcgcatttccttacatttgcggatacatccctgtatcagttcccggtagtcggtacctgcgtcaaatcctccctgtatctggaggagtatcatgatccttttcttttcaaacggcatctctatatcccgcaggatatttttcagctctccgtcgtcgtactggcgcaggccgttcaggtactcgtacagatccttatgatatgaatcttcaaactcatatcggtcctcctgtctcgacctcgcctgttccagcgccatgctcagaatctttatgcaccgctcgattatggacttctcctcttttgtcagttcaccggcgtcttccagcacaagcaggagcgcgttcgccccggctccgggtattgtgactgtatatcctttcctctccgttttatccggaaataaaaagacacactcatcatttttcagtgactttagccgcctgatcacactgtctttcatacacagcttcttgtcattcattcttttggcggcatagacgcacttaaagtcgctgtccagcaggataactgtccgtttcaggaactccgcgatccggtaaacgatctccatcgtccccctctttgaaaagaaaatatctgagatatcttcgatcaatttctgttcctttaccctgctccggtaactcagttcatatatatggttatagatcgtctggctcacctcagataatgaataataaaatggaagctctaaaagggggagctttaccttttccgcttccttgaccattccttcgggaatctcctggaaatagtctctgatcttcactccgagcccggcgcagccggcttcttttaattcgcggacgatccttttctgcgcttcctcgtcatggagcagaaagtagcccgtagtgactgccagttcatcctgttttacccaccggatcgcatccggattatccagcactgtcaccccgtcaaatctggtatttgtaaggtcgtcacaggcaatacattttatattttttaatccgcttgctgtcaccagccattctaaactacttttcatcggctcacctgcaaatatagcgtccgcgcggttttgatccgcctgtttccgcaccgcgcaggaaggtcctctcaacggtcccctgcaggcacatatctttatagacactattctttactttcgttttgatctgattctcatcatagattgtctgtttctccggatttaatacggccagatccgcatcttttccaagttctatacttcccttactcttatcgatccctaataattcagcgggcctgagcgataacacctccgcaatgcgctccggggggatctttcgtttacaacatccttctgaaaaaagtaccggcagcgtaaactggacgcctgatatgccggcccacgcacggtcaaccgcatccgtcaccgacttgtctgcgctcggagagtgatccgaggaaataatgtctatatgcccgcactttagttcttcccacagtgcgtctctgtttctcataccgcgtaccggcggcgcgcatttcagcattgctcctttgtccgggtaatcctcttctgaaaacatgagataatgcggacacgtctcgcaggtaatacgagctccctgccttctggcttcctggatcagcgctatgctttttgcgctgcttatatgggcgatatgcacgcacgcccccgtgatccgcgcaaacagcgcgcaccgcgccactgcctccagctcactttcttccggatgcatcctgctccagtcttcccaccttaagcgccccttcagcttcttcgagtaatagttgtttatctcctcattttcagcatgtatgacgatcgggaaattttcttttgcggcaagacgcatcgcctccagcaggaccgggtcggagacacgggggaaatcctccgccccgctgtcgcacagaaatgctttgagccccgccgccccttctgaaagcatgggcatgaccgcatcgagattatccgccgtcagtccgccccataccatatagtctgtaaaagaattgcctttaatacgcataagcttcatctgcagagaacttctgtcaacggtagcgggcacattgtcgatcggcatatctgccaccgttgtgatcccgcccgcagccgcggccatggaaccgtgccgccagtcttccggctcatctgcgccaagatcatccatatggacatgcacgtcgattccccccggaaatatataccgtcccgggacttgaacggactcttttgcagctccgagcatgcccggcatggacagaccggcgatgatcccgttgctgatccctatatcgagtctgcgttttcctgctgccgtaataacataacccttttcaatggccaaatcatacatatttatctgctctttctataatgccttactttgtctgcaaatcgtctgatcttttccgcatcccaccgcagcgggcttcccggaactggatcgtccagcatcagcgagctgcttacgaccgccccttcacagtgatccagtatgtcataaatattgtcctcactgaccgagccgcccaccagcaccggtttgcccagttccattttttccgcggtctccagatactccatcgtttccttataattatgtcctgtcagtataagaccgtctgctccgatatggctcgcccagccgatggccatatcgaccggcactcccggcatcggtatcccttcccggtcatgtacatctgcaagtatttttaccggggcatttatcatagtgcggtactgtaccgccgtctcaccgacgcctgtgcggatcccctctgccttgtacattgttccggcaaatactttgatgcggacgaaatccgctcccgcggccgcggccgcggcgatcggcgccactccgtcgtgagcctgcatgatcagtcccagtttcacgcccggcacttccatcttcaccatttttgcaagtgacgccgtcaaggcgatcgtctccggcagcgccgggcctgtattcagattttcatcctgtatatatactgtatcgataccattttcatagtggacctttacattggccatgacatactcttcgatctccgccactgactgagaaggattattcctgccatagtacggaagatgtaccgctcctataatgaccggctcctttgcatatctcattcttttccctccattgtgtaacagaccacatccttcagccgttcttccgccagctctctgctgatatgcagcgccggctcgatcccaaaatcttcaatgataaacgaagaagatacggtcccatatttggccgctgtgacgaggtcgtgcgtcttattgtatccgacgagaaagcctccgcagaaactgtctcccgctcccgtcgggtccttgaccgtgtctgagtgaaacgcgttcacaaatatgatttctttatttacatacacgagacagcctctttttccgatcttgatcaccacattcctggccccaagctgtatcattttctctgccgcttccgccatggggatatccccgaagatacctttcacctcgacttcgcttggtatcaccacatccaccagccggaaaagctcaggaagcttgtctatacactccggtctcatatagtcgctgccggtatcgagcacgatgagccctcccggattcttttctctgaaatactttgcataacccaactgtctgtcatagtggcgcgccgcaaggaaaacggcggcgtctgaatagctttcaggtatatcactcactgcaggcgcaaatatctcatgtgccatcgtcaccatctcgggcgtcatcaccgggaagccggcgatcagttcgccgctttgttcgctttcattaaaggttacttctctgcgctccccgttctcatcatagatcattcccgcaaacatcatatggcgcatgggcacatcttttatgccctccgtgtcgatgccccgttcttccagcatccggatccactcttttgggatatctgttccttttcttgagacgactccgatctctccgtcgtgccagagtgagatccctgccgtaccaaaggcggcgttgccgccaaatacatttaatttttttatgcccattgtattgatgatgttgtcaatactaaggcagccaactgctacataatccatatgccagcactcctattcccccaatttttcccttgctttcttttcctgttcaacagaaaggtagtatccgaataactgcagcggaaccgcatacacaaaattcgcaaaacactcttctgcttccggcagtatgaccgcctcatccgcctctttgacgagagccgcctcattttttgatgtgagtacgatcacagagcctcccagttcctttccggcccatatagtctccatggcccgcataacagaataccccggcggagcgatcaaaaacagagggtcgccctttttcagcgtgttataatgatggaattcttccagaagcaccggcaccgcatagaccggcgtcgcttcttttacttttgccgctccgtactccgcgcacgtaaagaatggtcccccgccgcagaaaaagaacatcttcctgctgtataactcttctgccattttccggatctttttttccgtcatctcaatggcctgttccataagtccaggtactttatcaaactgctcttcgtaataaccaagcgcggcttcgctcactcccatcacccttcccagctcgagcccgagccttacggtcactgccatggcggcggtggaagactgtgtcggccatccttttctggatgcatggatgaggataccggctgacgccgctttcatgagcggagaatccggtgtattggacagggcgagcgtctgggcgccgcgcgccctcgctgccagcagcgcttccactacccgcaccgtccgtccgctggaagacagcgtgatcacgagtgtcttctcatccacggccgaactgttataatatgcaaagtccaacgcgtcctcctccttgcacggaatgccgagcagcgactccagaaagaacctgacgccccgcagggcggcaaccgaatcgccgcagccgaccatatagatctgtctgatctctctctgtcccagaagtccggcggcttttttgaccgcctctttctcccggctcaatgtctcgcgtattttatccggctgtcccaccaattcctcatatgtataagaattccgcgcaagcctccgctcatccagcggatcatcgcccgcgacgaccttccatgtattatctccttcttcttcataaagattcatcaacaacgcacggtcttcggcgtttaaaatggaatcctcctttaacagtggcggcaatatcttatcgttcatatcctgattctctccttgctaatgcttctattaattgttcattcgttgttatctcttccccgagagacagctctttggcaaatctcactgcatacggcgtcttgagcatcgccttcttaagcactgcctcgtcatggaatatttcttccggcgttccttctctgatgatctttttcttcgccatcacaacgatcctgtcaaatgtatttatggcaaactcgatatcgtgcgtgatggtgatcaccgttttgccaagcccctgcaggctgcggatgatcttatcgaggctgatcagtcccattctgtcctgtcctgccgtcggttcatcaaagatatagacatccggatccgaggctatgaccgccgcaatggcaacaaatttccgtatggacagcggcagggaaaagggattttcatccttcatttctgtaagtcccgccagctcaagcgccctgccgcacctgttctccacttcgtccggcggcagtttcagcgctgttttagggccaaattctacttcctcccggaccgtggcatgaaaaagctggtcgtccggattctggaaaacataccctacctctcttgatatctgggcggtcgtataatcttttgtatttttaccgcccaccatgaccgttccctttgtcgggcggcgcatgttgttcatcattctcaccgtcgttgtctttccggcgccgttctgcccgagtatggcgactctttctccctgccggacagaaagagagacatcggacactgcttcatacccgttcttatatgtaaacgacacgtggtctaataaaatatctcccatacgattcccccgctatacttgttttagtaaatctaccgcttcattatacgtgaccggaatgctgtcaaaacacattcctctttttttcagctcgctgaatataacacttatctgtggaagctggatgccgtgctcctccagcctccggtcggacagcacctcttttgtccgtcccacggcaatattgcggccgtcctccagcacgatcatctcatctgcatactctgccagaagatccatcttgtgttccacgagaaggatcgttttcccctcctccttcagccgctcaatgatcttgaaaatgctctctgtaccttccgggtcaagctgggaggtcggttcgtcgatcacgaggatctcgggatccagaacgagcacggaagcaagcgcgactctctgctgctgtccgcccgacagttcatacggattcttcataagcagtgattcgatatctgtcttttccgcgatcgccacaacgcgctcctccatctcttccggcgccaccccgagattctcaagcccataggcgatctcctcgagcacggtctctctcaccccggatatctggctgaaaggattctggagaacatatcccatcatccgggacgtctctccgtcctcatactcgtctatatttctgccttttatgagaatctctccctgcagcgtgcccttttcaaatctcgtggcaaatccgcatatggccagacagagagtcgttttcccggagccgttgccgccgacgatgccatagagctttcctgcctccagctccagcgatatgtcttttaaggccggcctggaattcagcggatatgtatatgtcacatttttcaattcaattatcttaccagccataatatagcccctcctgtcgcgctaagtacgatcaccgcagacacgatcagcgcccgcttttcatatccgttgcgtgtggcggggatcatgatcgtcttcctgcatttaacggaaaacgccttggattcaagcgtcagcgccctctccccgacttccagcatggcatttacgaccagagggattatgataggcacaaatgcctttgccctcacaaatatatttccttccgtctcaacccctctggccctctgcgcgtccatgatcttataggtgttctgcttcattacatcgatcattttgaaggttgagagaaacacataggcagccttgtgatgaagaccgctctgctccatggcagcgctgatctcctgataggttgaggttttaaagagccagtaaaaaatgcctgcgaaatttaaaatattgaagctgagcgtcaggcctttgtccaggccgcccagataaatgtgcaggaatttccactgccacacaagtaccggctgtgcccccttgatcaggaacgcctgtatcacaaacagaaaacagacgagaaagctgaccattttaataaaggacagatagtctttcagctgtccgctcagcgcaaatatgagcggaatacaaagagagagcggaatcagcagcaacggtaactgacagatctggatgatgttggccaggataattaaaataacatacagtccgagcatctcgatcttgcacatcggatataacccggcaattttatttttctttttttccattaattgttctcggtacataagtccctccatctgcatcggccgtccttgtcctattcaggcttcttctttgtgaaattagccccgagactgtacttgatcaaagtgcggtccggaatgaccttcacaaccgcaaaagcgataataagagcaagcgatctgtccaccaggttgacccagaagtccgtgcctacgaccgccgctatgatattggcgccggatgccataagtcccgcgatcgctaccgactggccgccgttgccggatacccctccgaacgcaaaaatggtgatcggggacgccgtacatatcgttacaagatccagaactaacactatgatgaccagcttccacttctgtgtggaaaaccatttcttccttgcgaacattccggccgcaataccgcaggccgccgatgtgatcgcaaacggaatgagcgtcgggttatctgtgatgcccatacagagattagtaagtacgccggttacagccgcaggccacggtcccgcaagcatcgccatcagtaccgttcctatcacgtccaggaatatcggcagtttcagcagctgtacgatctggtcccccactacgttgatagcgacacagatcgggatcgtcagaaccgctaccattgaaaagtcttctttcattgaatatttttttgtttttcccatatttttgccctccttgcaaattttcctttaagttgagtttattatatcttttcaacattaattttcaataaacgcaaggaatcgttatgcaatttgcacactattttttatttttttattatttttctacattattcgacaatgtttttgctctatacgaggtgaatctcggcgaactgccggtgaaatgttaaatccaaagataaacgcgataattccccccggccgtctttgtatccacagacggccggggggaatcgtgtcggaattcttcattcatatgaacttctatttacatgcaaaccctttcatttcttccaggaaaccgcggataaactctacggacagatcaagagcttcctgtccgagctccgccgtggaatctttcgggtcaaagggaccgaaccatccgctcggcgcgatctcttttgtgtctctcacaagacggaccgtgcctcctttgtaacggactgcctgtatataagcagcctccacattttctgaagggtgctgcgcgttcatgggctgcccaagctccagatgtaccgcgtccggcgcgaccgccatcatggcagatgtctcgaggatatcaccgtgcccgccgcgaaacttctcatccagttccgccacaaggctccaccagtctatactggcgcagatgccgcccttgtggtagacttccagcgccgcgcggtcgatggacggcgtgttgcctccgtgtccgttcagcacgacaaaccgtttcactccgtgctgcatgagggagtccatgattccgtgcaggaccatataaagtccttcataaccgatattgatactgccctcaaagcttaagtgatacgggcagactccgtacgggaccgtgggggcgatgatcacgtcctccatgtccgccacatgatccgccagatacgagggcaccatgtagtctgtgcctagcgcacactgggcgccgtgctgttccgtacttcccaccggtatcacgagcaccgggtccttccggaatgcctcttttgcctgggctgtcgtcatctttccaagatacatactattacctccttttatctggcactgactttcttcagcagtttaaagtgccggtcgatcgtctcctgcggcggcgcctgcgtcagtctgctgacgatcaccatcgtgaccgcgccgagtattgtcgccgggaacagtgcgtggaatccatgcgccagttccttaagctgcggaacaagtgtaaagctcagaagagccgccacccctacagccacagatgcgatggcgccccaggccgtagatctcttccagtacataccgaacaggatcggcactacaaagacggccatgcccgagaacgcaaacaggttgatctcaaagatacttcccggctggaacacgccaaagagaatgacaacaagtccgatcaatatggtaactaccttggacagcttcatgacactgtcatccgtcgcttttttattgacgatcttctggtagatgtcccttgtcaccgctccggtcgtcgttacgagtattccgtcgatggtggacataccggccgccacgatccccgcgataaagagggacgcaaggaacgggttcagtcctctctggaggatcatcggcacgatctggtctgccttttcaatattccggatggacgcgatcccgtttacacctgcccactcaatcagcgtcgctgagaggaacatcccgcccgtaccgagcagtatcgccttaaacatcgtcttgtggtccttcatcgtaaagaacttggtgaacaggtggggctgccccatcgtaaagaacgaccagagcacaatgtttgatacgtagtaagcccacggcatataaccgttcgctcccgggaaggtcagatacgattcattcatactctgcagtgtgctgttgatattatgaaaaccgccgcccattttgacggaaacgatgaatgtgataactgcagttcccatcatgagagagccctggataacgtccgtcatcatcgcgcccttcataccgccgctcatacagtataatataacgataatacccattcctacaaccccgacccactcaggaagtccggtaaatacatgaacgataactcctgcgccgatgatctgagctcccatcatcggaatgaggaaaaagagcatcatgacaccgagcacgccgctcattgatcttgagtggtaccggtctgtcaggtagtctgccattgtgaggaagccatattcatggccgagcgtcacgagctttctgcctatgagaagcgcaggcaggatcatgcagaagacagcgcctggtacagagatggccattcccgcatatccgactccaaaaatcgttcccggcgtaccgagaaaagtacccatggagaactgggtggaaaaataagcgataccgctgacaagaacgccggcttttccgctcagtacgaagaaatcgccgagactcttcgtctttctgctggcgtaccagccgataaacgccataataccaagatatataactaagaccgtataaaacggcaccggtgatggttggatcgcttcagacattattcttctcctccttccgtatcttcctcatttttctcatcgtatatgtggtactctttccgtttcatacacattctgtagtagatgataatgagggtgaatgtgaccgccgtatgcgcaaaccacccgaatatgtatgacggtattccgcctatggccggaatgtaagtctcactgtaaaagaatggaaacgggatcataatgatgacgaacatgatcagaaagatgataagccatgtacgttcaaagtgtttttcaaatagtttcttcattgctttttctctcctcccttttgtgcttttttacgcaaagcagctttacttcatttttgttgagatatgcgaaattcacaaaaaataaagtatttactttactttttaattattattatacatataacaacaaaattgtaaagtatttacttgcaaattgtttatacattctttatatttattttataagcagtttacgatgcaccactgcatctgcgtatctggaaaggaaacaatatggatatattacagagaatccgggacttatatcccacgctcacaaaaaaacagagaggaatcgccgattatctgctggagaaccccgaggatgtatgctatgttacgcttgcccagctgagccatcagacgtcgtcctcggaacttacactgctgcgcttttgtaaaaaagcaggctgttccagcttcctggagttaaaaaatgagttccgggaatacacacagcatatgatcaggcttctttcggcgccggcatatttcccacccgaaaacgcctcatccgaaggctctgacaaagaagcgctcctgacagacatctgccgccgggaagccgccgcagtcgcagatttttccgcctccttcagccccgagtcgatcgtggccgccgccggggagataaagaaaagcagacgcatttttatttttgcccatgatatctcgaaaatactcggcgagtttctggaggccaggctgcggctgctctacttcaacgcctccctcattgatctggcggacctggcggagacgcagaaccggctgcagcaccttaacgagggcgaccttgtcatcttcttttccttcccaaagtattattatcctatgggaagcattgccaaaaaggcggcagacacgggcgtccctatcctgaccatcaccgacagcatctcgtccccggcggctgaatacagcactcaccttcttctctgccagactgccacaaagatgttctataattcactgacgctgccgatgaccgcgctgaacctgctggcatcctgcctcgtcattgacatggttccggaatcggaacggaaagattttaagaagactctgtcatcctgatccgcgtaccccatggttttcccggatcagactatattttataacaatctcaggaggtattgtatatggaaatcggaggatttttcccctatgaaaagaacagtattgaaacgaacggctacatagacctcgtctgcccggatgccggcgatgtaagccacctgatgtcgggccgctgcgccatctatctctgccttaaggattttatgctcacagataagaagcggacggcctatctccccgcgtacacgtgcgagacggtaagcggctgcttcgtgaaagcaggctttgaaatctactattatgacgtggaccgccgccttgtgcctcagtttgatgacagcctgatcgataagatcggctttctgctcatctgcggcttctacggattctctacctttgacacagacttcgtcagaacgtgcagaagccgcggcgtcactgtgatgcaggatacgacccacaccgccttctcaccgtacggcgcctgcccggagaccgactatatcgcagtcagcctcaggaagtggatgggcgtaacctccggcggactggcggtaaagcgcaccggacgcttcggcgtatcgcccattcccgcagatacggagcatctgaagataagagatctggcgctttgtacaagagaacagtatgaaaagaccggcgacgagacgctgaacaaaaagagcgcagacgccttctggaaagcggaatggatgctgcgggagatctttgacatgcaggcaggcgacgaagcttctctccggtcgatcctgcactacccgcttggtgacgccattcaaaagagacgggagaattacgcgtatctgctgaggcatctgccggacgatcctgcggtgcgccctgtcttcccggaacttccggacgatacgtgcccgatgttcttcccgttcttctgcgaagaccgcgagtcactcatggagcatctggcagccaacggcataccacccaaagtatactggccggttcctcccttcatcgatatcgaaaaatatccgggcgcgcgttacgtctacggccacatcatgtccgtcagctgcgaccagcggtttacgacggacgatatgcagcggatcgcagatgttttcacagcatacagggagaacagctgacggaaattctgagcttttaaaggtgcagttaataagggagtgccgcggcactcccctgaacagatattatttcagatattcatctacattatccttcgttacaagtacgaaagatatcataacttctttttccgtcttctctccatttacagctttctttatcaggtcgatagctcctcccacctgagcggggccatcctgaaggactgtcgcgcccatctctccgtccttcaccatctgcagcggattttcattgccgtctacgcctacgcacacaatgtcttttcttcccgcatcgttgcaggccttctgggctgctgaggacatgtcgtcattgtcacagatgatcgcctttaagtcgtctccatactgattcatcatatctgttgccacattggcagctttatccgcctgccactcacacgggaaatccccgacggattcaaacttgccgttatctttcatgatattctctatgccttctccccgctggatctgagccgaatttccgataacgccctggcagtgcgcatattttccgccgtccggaacattatcgatcacccactgtgccagcatctcacctgcttccacgtcgttcggccctacataagccatagccacgtcatctgtactgtctgtcttggaatttacgacgatcactttgatgccggcatccgccatctttgtgacggcggcatcggaagcgctcgcctccgccggcaggatgattacataatcgcagttctttgcaatacattcatccgcacggtcgatctgcttgtttgcatctgtctctccgtccaggatccctgtccagtcatcaattgttccgtccttttttaaagcatcgaacgtcttttttgcgtaatcattgatcggcgcatggaacgggtcaacgatatttttggaaatataaccgcagattattttgccgtcgccgttcacatctccgtcttttgacgcttcagtttttgccccgtcgtcttttttgccgtcatccttttttcccgaaccgcatccggccgccagtacggctgtcatcataatacagagcagcacacttaaaacttttcttttcatttttcttcctccttctgatttgaataaacttttataattaaggggcctcgcccgccccttaactacctctctgataactaactgttctttttattcattaccatgtcaaggagcacggcacctatgatgaccgcgccttttgtcatggactggtaataggaatcaattccgatcagattcataccgttatagataaatccaataataaatattcccataagtacgcccggcactgttgcaacaccgccggcaaaagaagttcccccaagtacacaggccgctaccgcgtccgtctcgtatccgatgcctatattagactgggcggaagcagtcttggccgtaaagatgacaccggcgattcccgccagaagacctgatatggcatagaccgctgtcttcgtctttataatgctgacaccggaggcgatcgccgcctgcatattatctccgaccgcaaatacataacggccgaacttggtccagtgcagcagtgtatacatcaggagcgtcgccagtatcaacacgaggataggaaatggtatcggtccgatcttagcggaataaatacttttgaacgcagtgtccgtgatcggtatagcctggcctccgctgatcagctgggcaaacccgcggatgatcagctgggtagacaacgtaactacaaatggaaacatgttgaactttgaaactaaaaatccgttgataaatccccatactgttgaaacgataagcgctataataattgccgccccaatattccaccctcttccggatatgagctgtccgagaacgcagctgacgagcgcaagctgagctcccacagataagtcaattccttccgtggtgatcgcaaggcacattccgtacgcgatcatcgcattgatagatacttgtgtcgcaacatttatcatgttgctcgtgcttctgaacgacggttccatcacagatataaaaaccatcatgataagaagaatcactccgattccatatttccccataaacatccggaatttttctctgtccattccgattattttactgttatcttctgccattgactctacctcctattttccaccgaacgcctttcctaaaatcgtctcctggtccgctgtgcctctcagtatctcttcccgggatacctccccgttgattttcccttcatggtagaccagaatgcggtcgctcatgcccattacttcaggcagctcggaggatatcatgatcacagccatacctctcgccgcaaactcgcacatgagtgtgtggatctccgatttggctcctacgtcaacccctctcgtaggctcatccagaatcaatactttcggatccgcgagcagccatttggccagaactactttctgctggttgccgccgcttagagaaaaggcatcgtgttcaatgctcgccgccttaagcgtcagcattttgcccatttccaggcagtccttttcttcctgtttcttgttgagaatgggcgctttctgttttatcggcagcgtgggaagcgtcatattctcccgtatcgaccggtgaagagcaagaccgtaattctttctgtcctcatttaccatacaaatcccatgacggatggcctggcctggctttcttatcttgatttctctgccctccagaaatattcttccgccggtcaaagggtccattccgaatatagcccgcatcgtctcactccgccccgaacctaccagcccggaaatgccaaggatctctcccttacggacttcaaaactgatatcctcaaacccctttccggagagtttatctactttaaacaccacatcaccgatactgcagaccgtctttggaaatacattttccactttacgtccgaccatcatggagatcaattcatcgcgggtaactccttccatgggacgttctccaatatatgtaccgtctctgaacacggagacgtggtcgctgatcctgaatatctcttccatcctgtgtgaaatatatataattgccacacccttttctttcagctcccgtatcgtattgaaaagatgttctgtctcttcgctgtccagtgaagaagtaggctcatccatgatgatcagtctggcattacacgatacggcctttattatctctaccatctgcatctgcgccagcgtcagttctttcatcagggtctttgcgctgtaggaaaaattaaactttttcaggatctcctccgcccgttcgttctgggctctcttgttcaggagaaaaccttttgtatcctctcttttgagaaaaatactttctgctattgtcagatggggttccggattcagttcctgatgaatcatggagatccctgcattcagagcttctaccggtcctttcgccacgtacggtctgccttcaaaccgaatggcgccttcgtccggctgatgcagccctatgatacatttcatcaacgtagacttaccggcgccattttctccgagaagcgcatgtacttcccccggcctcacaaacaagtccacgtctttaagcgcctgcgtaccgccaaacgccttggagataccgcggcattccagcacatatgcctcctctgctctcgtcttatcttccaaatatctcacctcattcttctccgacaaacttttgtatgtttccaacggtaattctctgtatttctgaaaaaatcatatcaacctgaaacttaaatgtcaatgcaaatatgaaatataatttcatacatttgcatatttcgttaattatcccacattttaaagcttatttttagtaactatatataacttgtatgtttttatatgaaattaattttcactttaaaggtaaaaaaaataactaccgcacaaaacacatctgcatcccggcaacgaacgtatctccaagccctatcgtataacgcggcttctccatataccgtgacgggacgagcacagccgtgtgtcttggctccattctccccagcgcttctgcaaatacaattcctgtgggacttaacggaagctcaaggctttccctgcagtcttttattgtgccgtaacgcccgatccgggcccgtgttcccgacatgagactgccgatcgtaaggcccatctccacatctaccccttccatctcttctccgtaatacagtgcgtaatccttgctgtgcatcacaattcctttcaccggatacagttccagcatataatcaagtcccgatattacagacgcaatatcatctttgtccaccgggtgggcctttttcttcgtcagatccaccagctcttcttcattcatccccataatatccatatgcccggcgagctttgagtacagcatgtccctgctcctggcactgataaaatgcgcactttcaaaatatatcttcagacggggatttcttgattttaatatactgtagtgctttgccagctgttccatacgttctgccaatatatccggttctactatggcattgaatccggatatgtcataggagcacatcatctgcgcgtgtccctccagataatccaggaaatcctgtctcacaggcatgatcttatgtactttgtcatatcccatgatcaaacggttggaaaccggcacctcatattccttatctcctgctcttatcacatcccctttattgtactgtatgatcagatggatcaagggcggcccgtccgtcacacaatccttcagggggacccgcctcccgtctttcacggactcgatctccttctcctgcatccactctatcacttcacgtgactggtccgtgatgtgtatcattaccggcatgcccagcgcggcaagcgctgcggcaccctgcgcacaagttcctcccagtccgtaatatatgttaaaataacctttcagtttgtcgataacctcgcccgaagttatatccacctctccgcccagaccgttgaccgcgtaataccccacaatcctggcaaaatcgtgcatatcggcaacgctctcttcttccccgcagtaaggctcttcttccagccagtctgccagcagcctgttgaagctctccacatcccatttcactatagcatccagattgcttgtataagccagtacgggccttgatccggccgcacggcaccggtcaatgacttccggcactgactcaaggtactcccgatatttatctatgtaagccatctgcaccctccgcttatctacaatttatattcgctcagcagcagttctacatcatcaccgtagcctgctttctttttatcgtctttcgcgttttgggttaaagcatcaaaatggcggttgatataaagaagcgcgtcactcactgccatctcaagaaggtgggaatccggctccgtatcaagtgcctgctttttcttatcaacgatctgtatcacacagtctgcgtgttctgccagctgtgtgtctttttcccctgttatcacaacactgtgcatctgcttcttcatagccagttccatagcctgaacgacctgcttggaagccccggatctggagatagccacaatcgtatcatcgcttgtcccaagacttacatgattcagaaaatgttccgggatcatagaatatgaacaggggataccacaccgttccagccgaaaccccaggtctgtggcaatgggacttgtatttcccgccgcaacaacaaataccatccggctcatccgaagaagccgcaccgccttaaccaaaagctcaagatcaatagtctcttccagggccgcgacccttgcggcgctggagtcaaagatccttcttgcagaacttggcatttcatcctcatcatacgcgggtctggccttacccagatcatgagacatcaggagtctcatctgatagtatccctgatatccgacatgcttgcacatacgcaccaccgtagcctcgctgcttccgctctttctggcaagctctgatatattcatcatgatcgcatgctccgggtctgccagtatgtatgcagccgctttcttttctgctgaaaatagcttttcataattctctttaatattttccagcacagaattcccacgtttatccataataaaacaccgtcctacttccgaatcaaagattcttttatttcataatatagcattacagcatttcattcaatgagtaatatttgactttatcgttatcattaaacagcctgatcttatgctcgacaacttcattcatggcccggacacttgccggatacagttcaaacggttccctaatcttcggatcctgcagcgtcttcctcaattcctggtaaaaagcatccttaatgtctgatgaaatattgattttgttgattccccgctttacagcctccgcgatctcggcatcctcatttcctgaaccgccgtggagaacgagaggaaccggcactttactttttatttcactcagcaggtcctgtttcagctcaggcttcatccccgccgggtagatgccgtgcgccgttccgatggcgatcgcaagcgtatcacatccggtctcctcaacaaaacgtaccgcatcctccggtttcgtgtaaataatgtcttccgttccgccttccgtatctccgtccgtcgtgccgatcgtgccaagctctccttccaccgataccccaagcggatgcgcaagctcacatactttcttcgtgatggcggcattttcttcaaaaggaagagaggatgcgtcgatcatgacagaagtaaagccggctcttacagctctcactatcgggccccatccgctgtggtcaagatgaatacaaaccggaatcggtgagccggacgctctgtcaatacacattttcagaaaactgtctccctgaaattccagctcactcggatgaatggcaaggataacaggagccttaagttcttcgcacttgtccattacgccgttcaagatctgccctgtaccgatattaaaagccggcacagcaaagttttctctgttagcaactgccaataagtctttcatgttaagtaacatattacttcctccttatacgaacaccttctgcaactctaaggtttcgttatgttaattttatgcctattctatcttacaaaaaaatcattgtcaataatcttgtgaaatattattttatattaccgtcattttatctattatttactctttatttttattattttttgtgctattattattaaaacataaaatttataacgttttcatgaaatatattttctttatcaactatttagacagctattatgcctgtactaaataatgtactaaataaatatcttgtaaggaggagatacacatggacaatgtaagaaaggtatttgaacagggcggagggattctacatttgatgcccacatgggtcccccgcagcttcaacgagcccggaaggcgtctgcggcttcaccctgacgactactacgccctcggtatggaccgcggaggcatctgcgagagatggctcggatctctggctaaggcaatgaatggccccaagacaggagagaccgaggggatgagctatgtgattgaagatcccggcacaaagtctgtaaggctctttaaagactatgtggatgaactcggcgccgatctgatcggaagcggccttatgtcaaaatacggaacatggcctgcttttgcaaagctttatgactacgacaagcccttgttccatcatctgcacctgacagaagaaaaggccggcaggatcgggatgcacggcaaaccggaagcatattattttcccccgcagtataattgcagttatcttggacggtttccgcttacatattttggcttcgacccgtcggtcacaaaagagcaggtcatggaatgccttcaaaactatgacgtgaaagataacaggatcaccgaactttcacgcgcttaccgcatccagctcggaacaggatggtatacgcccgcaggcgtgatacacgctcctgcatcagtcgtcacctttgagcctcagtggaacagcgacgtaaatacgatcatggaaaatgtaacgatgggagaggtcaatccgcacaatctgctcacagactgtgcgccggatgatgaaaagaacgatttaaacgcgatctttgatcagatcgactgggaagaaagtacaaggcctgattacagggagacttatttccgcgctccaaaaatcaaatctgaaacatccgcgtcactggagaagtgggtcgcctacgcaaacgactgggtcgccgccaaggaggtgactgttcttccggggcagcgctgtacgctgaccgaccaggcatgttactgtgctgttatagtccagggacacggaacgtttggcgcttttgagtgtgaggctcctgagctcatacgctttggtgatattactggtgacgagtactttgtatccgaatccgcggcaaagaaaggaattgaaattgtaaattccagttcctatcagccgcttgtaatactgcagaactttgcagacaacaatcccgaagtaccttcaaaagtataagcagaatgcactcccaatactatattgggagtgcattctacggcaaaaccggccgttccgcctcggtcagttatacggcagtcttatttttcataagtacctttcttttttaaggctccggcctccatcatgacagcgcctctcgctatcaccgtgtgaagttccagctcctctgtaaaaagcagtatatccgcgtctgccccttctgctatgcagccttttttcgggtatatgtcaagcgcttccgccacatgggctgtcacatatccaagggcatcttcaagtgccattccaagccctttcaccatctcttttaattctctgtacagactgtccactcctgatacgccgatctcctgcagcgttccgtcctcaccgtagctggaccagctgccgtgtccgtccgagctgatggtgatgtgttcaaggggaaggcctctcctggccgcctccgcaatgcactgcccgggggaaggctggcccttcatcccacacgtatagtctacatagccgcccttctcaaggaaaccgtaccccgcttcaagcagctttccgttgcggtttacgtgggtcggacggaagatacggacaggaagcgcgctccggtccagcacttcgtacaccggctccagtccttcgggcgcgtcccccatatgcagcacaactatgcctggctttccgctcagcattcccgccactctgacgcggcttgcagtctgcatgagctgctccggcgtaatgtggggcgcccggtggtcggataacgccagtttcattccgaggacttctctgataaacacgatatcccggtctgcctcaccggttatggacggccccggatatccgtaggcgccggtcagcatgtaggccgttaccccttcctcattcagcgcggcagtcttggcatacagattctccacgcttctcgtcattccgtccgtcccgagcaggcccacagccgtcgtgatcccgccctctatcatctcggacagggcaagctccggggtgcgggtgtggaaacttccctccccgccgccgccggtcacatgtatgtgctggtcgatcatacccggagacagcataagcccttctgcatctatcacacggcagctgtccggcagtccgtcgatcctgtcttctatcaactctattttttcattgcatacaagaatatcttttttcccaatacgggccggagaataaatctcggcattttttattaacagcatttcgcaaaactccaatctcccagcagggttctttctcaaatccatattgcatgatttccctgcatttgtcaattcgatacactgttaatattcatttatttttctcaccggaaactaaatttctgaaagccattcctcttttgtccccttgtcccggataccgttgaccctctgtagaaaatgcacgccgctgtctccgctgccggcacacatgcgccgcgcatcagaactatttaagaaaactgctcttaagctttaatatccgtctgctccccgtatatgtcacgataaaatacagtccgtacaccgcgactacgagtcctcctgtaaacatcccggtctgcagcagctttcctgtactgatctcctccacaccggcaagcatccctcttataataaataatgcgtttaccacggccagcatgaacggaatcccaaaatataccctcagctgcataagcagtgattctttcatatctttatctctggcgcccatcttcctgagcagggcgtatctttgttcattgtccgccgcctgggaaagctgctgcagcgcgagcactgctcctgctacaatgagaaatgtaatgccaagatagattccgatatagctaaccgtgagtatattggacataatttccaccttaatatccatatgtgtattgcaggtgatatgctccggtatggcgagaatggcttccgaaagtttttcataggaatctgcattcaggaacgttccgctgtccacagccgcgaacagttcaagaccttctgtcagccgctgcggaacgatcagcgttcctccgtctgagtacacattttcattgccgtatacacggttatagaggcccttggacgccggagtcagctctgtgccttcgagctgcaccgttctgcctttatggcgcatgaaattttccagtttttttctgtcttcctttacactgtaatttattgcatattcattttctccgagctttaccggcgcctttccctgaagcgccattactctgttgtaatcgtcgataccgacgatattgatataatacttaaattgtccgccgtcgctctctttctctgcggcggatgcgccgaagagatcgctggtgagccccttcgcattatatatccgaagctccgccgaatctttcacatagtcagacagtacgagacccttctgcgcaagaatctgttccaccgtcaggccttcactcaggccttcgtctttgcgcagcggaaagctcacgtcataaggtgcggcctcatccgcgtcactgacgagcgcccctccgatactgagtccaagcgtcatagccgatatagacaggcagacgagtatgctcaccactccgatagaggcgccggcgcttttcattctgctgccgagctggttcaccgcaaacagatgcagtcgtctgtagtagtaccgcttactgctttttcgcaccttcaccagcacttcagacaccgacatacaaaataacatgctccccgcggcgatcatggcgatcccctgaaacattccctgtgtaaaatacagtttttccggagcagcgagcacagcgtaccctccgccgatcagcgccgccgccagaacaaacatgagaatatcctttgtctttcccctggaaatattctcatttttcttccctgcgtacagaagttctagtagctgcatctttcttatctcccgcatattcctccggtatacgaagaaatacatacatccgaagaaaaataccgccgcggcgaccgcctttggcgaaagaaagaagcggtagtccgcaatatccgtcccgataattcttgcagtgaccatggacagcccctgggacagagctataccgagcacgagaccggcagccagggaagctcctcctaccaggcatgtctccttccacatcaaggcgcttatatcttcatattccattccgagcgtcatgtaaacgcccatctccctttttctgcgtttctgcataaactggttggcatacgccacgaggaatcccatgatcaggcagacgagcagagacacccccgccatcatcccgctggaaaagctgaggaaatttaatctgtcaggtacgccgaagacccgaaactgtgcttctattgaattgaacgtatagaaaagggcgacggaaaaagcgagtgtcataaaataaataagataatctcttccgctttttttaacattcttgaccgcaagctcccgaaatacttcttttgaagccgtccggtctgttctcatcttttcagaccgcatggctgagccctcctcccagataagatacgacctgcatgatctcatcaaaaaactgcttccttgaacggcttccctttaccagctcgttaaagatccggccgtctttgataaaaagaattcttttacagtggcttgccgtaaatgcatcgtgcgtcaccatcaaaagagtcgcattctttttctcattcatcatacggaagctttccagaagcattcccgccgacttggaatcgagcgcgccggtcggttcgtccgccagcacaagagacggttttgtcaccacggcccgcgcgcaggcgactctctgctgctgtccgcccgacatctcatacggatacttatccagtatatctgcgatacccaggtctgccgccacctcctgtaccttacgctctacagtccccggcctctcacctttaatggcaagcgccagagcaatgttctcccgcgcgttgagtgtgtccagaagattgaagtcctggaagataaatccaagctcctcccgccggaatttggcaagcctgcgcttatccagcacggtaatgtccgtacctctcacccatatctgcccggatgttgcgctgtctatcgtagagatacagtttaacagcgttgtcttcccgcttccggacgcacccatgattcctatatattcaccgctttgaacatcaaaactgatatgattgactgctttagtcagacttcctttatttttataaaatttttcaagatctctgactttcaagattgtgtccatttatttgttcctccttgaattgttatccacagtctaacattctcttctgtattcttccacagatttacatgacagaaacattacattgctgtaatgttccgcctgttcatctctcatacagttttataccatcttcagataaaaagataccgcggttccttctccttttaccgaccggatctccatctctatgtccattctttcacacagattcctgcagaggtagagacccatacctgtagactttttaaagagccgcccgttctcccctgtaaatccttttgcaaataccctgggaatatcctgggaagctataccgatcccgttatcctccacagtgagcctgatccggtttttccctcttccctccttttcatctgtctgttctgcggaaaaagacagccatgaatctctctctttatcacgatactttaccgcgtttgtgatgatctgtccgagcacaaattccatccacctgatatccgcaagcacttcgcagtccagactgccgaactttggggacactccttctgccaccatcatcctggcatttctctgcactgcgctcatacataattttttaagtgacagcggccggataatataatctgattccacacttgcgcttttgctgtaatagagcatctgctctacatacttttctattttatcgatttcttccgcaagaccttccgccgcttcccctttatgattctcaaggataagccgttccactgctatcggcgtcttcacttcatgcacccatgtctgcacataacttttatattcttccagttccctgcgctgcttcgcgatcatgtcattcagatactttccgttcgttctgacaacgtgatacaatatttgtccgtcaagaaattccggctcttctatcatttcgctcagatacgacttttcctccagctgctccagtgtatccgacagttcatcataataccgctttttccttaaaaagtcatagcctgcagacagaaacactcccgcgaagtaaagtatcactaccgcggcagtgactggcgcagggctccccataacactcagaaaagccgccgccaggaaacttatgaacagttctgtgaagagcgcgaaccatctgtcttttatatactgtgaaaaactcataccatatacccctgtccccgttttgtgagaagataatcatccagtccgatatccgacagtttcctgcgcagccggttgacatttaccgtaagcgtgctgtcctctatgaattcttccatctcccacatgtggcagataagctcgtttctcgaaacgacagcgccggcatgctccatcaaatatttcagtataccgagttcgttctttgtcagatctgccttcttccccctgtggctggcgctgctgcccagcacgtccagagacagacctttgtgcgtgatcacaaacgacctgcccggcccttttacccggtgcagcactgtcccgatgtgggccagaaggatatgaatattatacggctttgtaataaaatcatccgcccctacgttcaggctcatcagctcatccatgtcactgtccgagcttgtgactacaatgacagggatatcagactgcctgcgtatttcgcggcagatataaaatccgtcattcacaggcaggttaatgtcaagcagtacaagatccggcgccgcctccatgatctggcggggtatatcaccaaactctgccgccgcctccactgtgtatccatttttctccagaacagtcttcagctcactgcggatcttctcttcatcctccactataaaaatacgttccatagctttacctcctgcacatatgtctccattctcatcataatatggtccattataacacgatttcttctgtttcatgttctgcgtggagatatttatatctttttatgcgcgcaaaaagctgccatattgtaatttgatacaatatagcagcctttgttccctgctgtcttattctgcaatagaaaaacagattttcagtacggcaatgaaaatcgcggccatcaggcccatgaacacggggagcatctctataaatgcgaaaccgacaatttgaatatacatattgttcactcctgtcatccggcaattgttaactactgacatttactaagtgtcatatttgtgcttagtttaacataaactaaaaataatgacaagtagtgaatgtcaatttataaaacactacttatgacggagggcttctcaatgtataagaataagactgcaaacggaaaaaataatttgtgcggaagcaaactgagcctgttaagaaaacagctcacaccgaaggtatcgcagagggcatttgcagataaactgcagcttaagggcattgatctggacaaaaacgccatacagagaatcgagtgcggaaaacgatttgtgacagatatagaactcaaggcattcgcgcagattctggatacaactgccgacgaactgctcagcggggaataagattccaaaatgacaaacgtccatggaataaattgcgttccacggacgtttgtgtctcatatttttacaagtgctttaaactgttcctttaatgaccggtatgactcttcgtatacgtcaaacatttcccggtatggttctatccattcctttaccggctctaccgtctttctgatcttaagacaggcggcggacgcttcttccggacttttgtattctcccatgtaagccgcgtttatgtaagacagtccgcccggcgcgcccagattcacttccggcagcttgatctccttttcaatgacagacgctttgatcttcagccagatctcacttttactgcagccgccgcagcagataatgtcatgaataggaattccgatcttaagcgcctggttcaggttatccttcagcgcaaagcatgttccttccataatagagcgcatcatttccgcccggtttgtattcaggttcagtccgataaacgcgcctcttgcgtccgggtcccatatgggcgccctctcccctgccatatatgggagaaatatgatctttgacggatactttgccatcttctcgatctcgctgttgatcctccggtaggaatctttcctgaccgtctcccctccaaaaagcgcgtctctgaaccacttaagtgaacctcccgctgtattcatcggcccgtagaggatcgtgctgttttctcctctcccttttaagtaggacagctctcgtgccgtgacaagcctgtcaaagcctatgagcacgaccgaacttgttccggtcatttctgcgattctcccgccctcataaactccggcctccagccctgccgctgtggcgtccaccgctcccgcgagcactgttgttttcacagagagccccgtcatctgcgctgcggcttttgagacatttccaatcggttcacagcacctgtagacatccggcataagcgagcggtccgcgccgacagccgccagcagttcttcgctccagcagcagcggtgtatatcgtagatttgagtaagtgaagcatgggtatcatcgatggaaaatgttccggtaagcttatagttgatatatccgttcacctggaggactttacagcacttttccataagttccggcttattgcgcagaaaccacatgagctctgtcagtgtgaaatacgtatccagccggttgccggttatctcaaatattttatcctctcctaccctttctttgatgatctcatattcttccttacttcttctgtccatccagatcaatgcgtcgtggagcggctttccgttcttgtccacaggaagcacggccggcgcctggctgctgaccgatatgactttgatgtcttctgcgtcaacccagcttttagccagcactatgcggatgcactgtacgaccgcgtcccaccagttatccggatcctgctgcacccaggaaggctccggaagcagcgtctcatactccttttcagcctctgccgccacttccggcccttctttgaaaaggatacatttgaccgttgttgttccaatatctatcccgagggaatactgcacgtttcattcctcccattctaggagagcacctccggattgcagataaaccggggtctttctccagcaagtagtttcttcacatcgccaagcgtgatctctgtctggtgtcccacaatgtcccttgcagagccggccaggtgcggagtcagtacgacattgcgcagcgccaggaacttatcttttgacggtatcggttccaccggatacacgtcaaggccggcgccggcgatattatgttctttcagcgcgtcgtaaagggcatcgtaatccagcactctggctcttgccgtgttgacaaaataggccgtgggcttcatgagcgcgattctgtctctgctgataagcccctctgtctccgggactacgttacagtttacactgacaaaatcggactctttcatcacggtatccaggtccgtcttttttgccccgagataatccatatcttcctgctccacataaggatcataaacgagaagctccattccgagcgcctttgcgcgttttgccacttccctgccgatcatgccgaatccgacctgcccgaatattttgccgtacatctcggggccgccgccgtagagagcaaaaggagcatccggatccatagaccactccgacatcgtctgcgcgcgttttccgccgtcatccttataggaaactcctgtcagctcgtcagtgtatttcagcagatggtctgtaagactgatatttttggatacgcacatgagcagcgctatcgtgtgctccgccaccgcgactgcgtttcttcctccggccctcagaacagggatcttctttgccgtggccgcctcaatatctatacttgcaaaggcctcgttccggcagcacactatgactctcagccggtctgcggcctcgatcacttcttttgtgatatcttcaaattcggtgatgagaagctcgatccctttgatcttttctttcatttccgcagccggcatcttttctccggtcacaccataacctgcaaaagtgtaatccgacgtgaccgtctcaagcagcttttcatattttctgtcaaacctcgctgtgatcaatgttttcattgcccgtacatctcctatctctgcccatatttgtttaaaaagaaatcgtggaaaaagtcaatatcctcctgggatatctccacaggacctccgatgctctggctgttgatgtataccatggcggccttttccagcacctgggaaccaacgtacgcttccgtgagcgtacggcctaccgttatcgccccatgattggcgatgagcgcccctgcccgctccttaagcgcgccgactacttcctctgccatctctttcgtccccggcatcgtgtatgcggcaagacgcacctctccgccgagtatctgaacctggtcgtcacagacaggggggatcggttttctggcagtcgcaacggtaagcgcataggtcgaatgcgtatgcatgataccgttcacctccggtctgtccagataaatggaggcatgtacgaccgcttcgacagaaggctttaagttcccttcatacgcaagcgtatgcatattgatgatcaccatgtcctcagcggccagccgttcgtagtccatgccggacggcgtgatgaccatgtactcgtcgtccaccctgccggatatatttccccacgtaccggctacaagtccgctgtggtacatgctgagggccgtattgcacacttcgatctgggtcagttttgctttttctctgttcattcttttatcctccatatgtttagtatctgtactgatataacagatgctcccctttcaggaatctcttaatatcagatacgatctgttttgtgtggttcacgagcacgtcatctgtcgctcccgcgatatgaggcgtcacgaccacattgtcaagttccgttatgtatggatgatcgcgcgctatcggttcactttcgtatacgtcaaaggccgctcccgcgattcttttttccttcagggcttctataagagcctcctcatcgagaatagctcctctggacgcattgatgaaataggccgtcggcttcatgagcgcgatcctttcccggctgataatgcctgtcgtctccggcgtcaccttcatgtgacacgtgataaaatcggactctttcatcaactcttccaccgaatgcgctttttttatcccgatctcctccacatcgacttcaccgacgaacggatcgaagatcagaagctgcattccgaatgctctggcgatccgtcccaccctgcggccgatactgccgtagccgaggatccccagcgtcttgcccttcagctgtgtccccttaaagaccatatagggggcatctgctttcatatcccagataacgtctgccttcagtccttcctttgtctcctttctggaagacgggtctccggtgtattctcctccttttaaggccttatacgccatagggatctttcttgcggcagagagcatcaggccgatagtcatctctgccgtagaatcagaattacgccccggcgtgtagaggaccggtattccccgctccttcgccgccgccatgtccacgtttaccggggttgccctcgtacacgcgatcagtttcagatgctctgcgttttctattacctttctcgtaatgtcgtcgtaactcgtgatgatcatatctgcgtcccgcgtcttttctgccagttcttcttccggcattttcggaaggccgagcgcccagccgtcttttatgatttcccccacttcatacagaggcttcagttcttcctcgttatactcggctgtaaaaaaaatcttcatcgtactaatcctcctcaatggctttgatttttttgttcatctgatgtctgtagtcccatatttcctgattatgtattctgactcttttgtataattcatagataaggtcatatttttttacatttcctggatccgggtgaaaaacccgcttaaatttacaggctttttccgccgcctcgtcataatctttatacagcccctggcttacccctgccatcagggcaacgcccttggcccccagttcttccccggatggtatcattactttcatgcctgctacgtctgcgatcatctgtgcccatacgggacttttcgccccgcctcccgccaggtagatcgttcctcttttgtctacattgcgcagacagtctctgatagaaaggctgatcccttcatacaccgcccggatcagatgttccctcgtcgtgacctggctgatgccaaaaaagctggctctcgcatagggatggtaaaacggcgccctctcccccgcaacgctgatgtacggatggtacacgacaccgccgcatccgaccggtatgctgtccacgatcttgtctatctccttaaagtcttttgtgagagatatattgctgagcatccagtcaatattcggcgtcccgttaagcgtaggctggagttccacaaacaactctccgatcggatgcttttcatatctggaatttggcgccccaaattcacagtcttccttcttcatcacgatctcacttgcgcacgtagtgcccagaatgacgcatacatccttctcatggatcgccccaagccccaccgctgtggcggacgtgtccagggcgcccgcgatcaccggtgtgccccgtctcagtccggtctcatctgcaaaggagtccagaatagttccgacgacctcatcagaccttgccggagcaggaatacaccttctgtattcatagacaccaagctccttcataagctcttctgctatcgtcccgtctttgacgtctatgagggaggtcaggctgtctgtgatctctgtcctgatctccccggtcattttaaaccgtatccagtccttgcagaatatcatgtatctggccttatcaagtatttctctgcggttgtgcttcatccattttaagagaaccatctggttgcccaaaagaggcggcgttcccgtcgtcgtgtgatagagcgctcccacttccgggcgctcctgcgtgatcgatttcacctcgtccactgccctgccgtcacaccagagtatggcgttctgtactgggttcccatctttaccgatgagccagcacccttccccctgccccgtcacgccgatggcagccacttcctccccggaagccgcgcctgcctccatcaccccttttacacactgttttaccttttcccatacgagaagcatatcctgctccacctggtttgcggcgccgttgatcgtccggctctccctgctcgatacactgacttcattgccgcattcgtcgaacaataccgcctttacatttgatgttcccacgtcgatcccaagaatatatttcatcatacagcctcccgaaaacgtttatgaaccgctcttttgttttccaattcaacttgttatctttcaaaaatgtgacatatgtaatattatattacatttgtaatttcagtatagcaccttgtgtatttttgtcaattcctttccacaaaataaagcggacaagtccacttcaattccctatataacaaaaaaagcgctacctgaaaatcaattcagataacgctgtacgttctccttcggatatatttcaattttaaaagctgtccataacttgtcttgcggtcgtcacgtctacgatcagcgtgtttatcgttcctgtgcacagggcggcctgtattgcctctaccttctgtgcgccgctggcgataaggactgtattcttgatacctttcagacattccatgtctgcgtttaaaagtctgtcgcttaaagggcagttatcccagctgccgtctttccggatcgggttcatggcgatatctcccacaaatccctgttctcttaagatacgcacatcgtttctcgtgatatgtccccttgtacacatcgttgactgctccgtgagctctcccactccgagcagcgccacatcgcacttctgcatcagctcacacgaaactctgatacttctctcctgcatcagccattttttcgtctccgcgtgttccaccacaacgggcgcatacagcatatagctgggacagtccagcctgtttgcaagccctctggcaatttcgtccgatttctccacaagctcctctatgttctgtgccccgataagctgaactacccggcactcacttcgccttttaaattccatctgctttactacttccgacagagtatgtccccaggatacccctataatatctccctgccttatattttcatccagatactgggccgccacattggcaactttatagatagccgtactgctttccccgtaatcttctgtaacgagcacctccttcagtccaaagcgttcctccattctgcattccagctcaacgttatccctctcgtagccgtggatattaatatttacaacatccaggtcaatgagagaacttatgatctgattcaccttctgccttgtaaaagacaggcgctttgcgatctcatcctgggtcatccccaaagtgtaataccagtatgctattttaatgtacaggtttcttttcatagtgcctcctcgttacaaatatatctcaatctatctttgtagttaaagtataacactggtcattaaattttgccaatcattgtttacagtcaaaaaaacccaaaaatgcccgccggtgggcacttttgggtttttctgttccgctgccttttatgtgtattatatcatcttcaatattccttctgccatcgccttcagtataatacagcaggacgccgctccggcgtccagaactcctctggagcgctcgcccagccggctggaacgcccgaatctggcaaccatgtcctttgtgctgtcccggccggcttccgccgcggccgacatctccacaagcgcctccttgtaatcctcccccgcttcatgagccgccttcaccgcgtccacagccggggacagcgtatctaccagtgtcttgtcgcctaccttggcctccacgatcccttgaaggcctgcaaggccggccgccagcatattcccgaagtcctccacactgatgtcctccagctcttcccctgcttccgccatatccataaatatcgtcccgtagataggtcccatggaaccgccgatctcattgagaaggatcattccgagttcatcgagcccctccgtaaagctgaagtctttgtccgcgaaacgctgctcaaacacggagaatcctttattcatattcataccgtggtctccgtctccgataagtccgtccacttcgccgagatacgctttgttatcctgaacagcctttaccatattcaagagaaccggtttcccgtctgcatttttaaatgtattcattttattttcccctcctgccgtctatttttgtttcagccccatactgtacgccggcatatcgatcagttctttcagttcttcatccagcttcatgaccgtcagggtcgcgcccatcatctccagtgatgtaaagtaattgcctacatacgctctgtggatcatgatccctttttctttcagaagcctgtcgatctcatcatataagacatacagctccatgacaggtgtggcgccgagtccggacacgaggactaccacttcatccccttccgtgaacggataatcaggcagaacgacatccaccattcttttcgccatcttgtctgccgtctcaagcgggcagacctcgatccccggctccccgtgatggccgattccgacttccatcgtcccgtctttgatctcaaagttcggatggcctacagccggaagcgtacacggtgtcagtccgataccgacggaacgtgtattgtcaatggctttctgggccgccgcgatcacctcgtccaagtctccgcctttggccgccttcgctcctcctactttccacatgaggacctccccggccacgccgcggcgtttctctctctcgtctttcggcgcggaggcgacgtcatcgttggccactactgttttcacggtgatcccctcttttttggccatctttacagccatctttacattcatgttgtcaccggagtagttgccgtacagacaggccactccttttccctggtctgctgccctgcaggcgtcgagaaaagccgccgccgtaggtgaagagcagatttctcccaccgccgccgcgtcgcacagattctctcccacatatcctataaaggccggtttatgtccggagcctcctcccgttacgacgccgacctttccttccggaatatgtttcgccctgacgactctcggattctttgctgcctccacgatatcctcatgtgccttcaggaagcctttcagcatttcgtctactatgttatccgggttgtttaatatacgctgcatacacgtttcctccttatgcttccatatccggaacgagaatcactttcatcgccccattttcacctgtcttggcaatgtggaatccttcttcccatttctccagcggaaatttatgagtgacaacgccttctgtcggaagctttccgctgccgatccattcgatgaccgtgtcataacagaacggactcagatgtacgccgagaagatccagctctttcctgtcggaaataatggaccagtctaccgttaccggctgtccgaatacggagaattctacaaaacgccccatcttgcggatcgcgtccagcccctgctgtacacttgacggatgtccggttgcttctatatagatgtcgcagccgtagcctcctgtcatctctttgatttttgcgacaacgtcctcttttgcaggattcattgcaatatccgctccgaattctactgcttttgcaagacgagtttcattcatgtccagtacgacaagacatttcgggtttgcctgtctcagggcgccgaccattccgagaccgagtgttcccacgcccgagagtacaacaaaatctctcggtgtcacctgcgcccgttccacacagtggaaggaacagccgtaaggctcgatcagagcagcctgttccaacggcatatctgccggcacgagataagggatcgcctctttcgtaagcttcacatactctgccatgccgccgtttacattattctgaaagccgaacagatcatgtttctcacacatccagtggcggcctgtcttacagaacatacactccccgcatggcacgatctgttccggacatattctgtccccgatcttccagtttccctttactttatctcccatctccacgacagtccccacaaattcatggccggggatcatcggttcttttatgtatttcgcctgcccgtcaaagccccagaagctggctgccccggcgtaggcttttgtatcccccgcacagataccgcacgcctcgactttcaggatcatctccccttcgcctgctcttggcgtatcgaccatctcaaatctgtaatcgcccggagcataggcgacgatcgctttcattttttcaggtaaattgctcataataactacctccttctgatggataacttgctctattcccggatacgttctcctgtctcaatgtcaaacaggtgcgtcttctctccccggacttccagtttaatgatatcgccgctcttataccgggtctcatcatctgtgatgagcatgagcagcgcctcgccgacgtgaatgccgatgcgccgttcatctcccagattctcgaatgtggcgacctcctccggcgtgcccacggaatccgctcctccgatcagtacatccatcgggcggactcccatcttacatctgaacccggcgctcactacgttatggtatcgttccggaaccgcgatcttcaggttactgtcctggaaggtaaagaagaagtgcccttcatccgcagttattgtcgtctcgagaatattcatcggaggctctccgataaaggaagcgacaaattcatttaccggatcgtcgtacacctgcgccggcgtgccgaactgctgaagcacgccaaagttgatgatggcgatcttatctgccagtgacattgcctccagctggtcatgggtcacatagacggtcgtacatttgatgtcattgatgaggcgcttgatctccgtacgcatggcctggcgcgccttcccgtccagatgtgacagcggctcatccatgagaagcagctccggccggcggataatggcccgcgcgatattcacacgctgtttttgaccgccggagagcttcaccggcattttatccagcagatcgtcacactgcatcagaggggcgatctcctgcacccgcttgtcgatctctgccttgtcgacgccttttgcctttaagttaaacgcaatgttgtcatatacggtaagcggcggatacatggcgtaatcttcaaaggcaagcccgatatgcctgtcttttggatggagcttgttcacgagtgtatctccgatataaatatctccttttgtgatatcttccagtcctgcggtcatacgcagagttgtcgtcttgccgcacccggaggggcctaacagggctatgaattctccctgctcacatacgagattcagatcatttacggcatagtcattctgtacggcatttttcttctttttgccgttattttcataacgcttataaaggtgttcaattcttaatccagccatattcttacccctcctgttccgtcaaagccagcaccgcggcttcgttgtatctcgtcaaatattcttttgtctctgcgtcaaagaacatagcataattaagttccatatctacataaacatcctggtcgatcctcacagtaaggccgtttggagcgatcatgcgaagctgaagtccatcaagttccgccacgatgaccgacttgttcccgatactttcatagctgtaaacggtacatttcagatatccttccttcggctcaaaagagtatttcagattctggggcctcatgccgatatcaacgttttcacagccgagctcatccagtttctcaaagagttcaaaatcatcgggcagtctgtagcttttatttccagctttcatatcaaatgtataggaatccccgtcttttttcagcgttccgacgatcaggttgatctccggatcccccataagctgggacacgaattcgttgcggggcatgtaatagatctcatcacccgtgccgatctgtacgatctttccttgatttacaatggcgatcctgtcccccagagacatggcttccatgaaatcatgcgttacataaacgctcgtcgtcccaaagtttgcctggatctctttcagctccgtacgcatggagttgcgaagcttcgcgtccagatgcgcaagcggctcatccatcagatacacccgcggggaacgaacgagggcgcgccccatggcgacacgctgtttctgtccgttggacagctggcttggaaggcgcttaagaagataatccatcttcatcatctcggccacttcctgtatcttctgtctgatatactcttcatcctttttgtacagcgggctcctaagcggagacgccatattatcatatactgtcatctgtggatacagcgcatagttttcaaataccatggcagtatccctgtgtgcggcgtctgtcaggttcatcacttccccgtcaaattttacaacaccttcctccggtatctggatcccggcgatacagttgagaatggtcgtctttcccgcacctgcagggccaaacagtacaaagaactctttgtcttttatatccagagaaatgccatccagagccgtaacttttccgaattttttcgtaacgttttctaattgtattcttgacataatctcacacctatcccttcactgcaccaaaactcaggcctcgcaccaaatgtttctgtatacataatgcgaatatgatcgcgggtaacgcagatacagtcgccgcaacggccagctgtccgtaatgggcgctgtctgttccgaggaactttgtgatggcaactgttatcggctgaacattcgtaccggccaggatcaacgggaacgtgaagctgttccatgcgaagataaatgccagaagcgcggcagatacgagtcccggctttataagaggcacaagcatcttaaagaagatctggtaccatgtgtaaccgtccacctgggccgcatgttcgatctcaactgaaatatcctcaaaatatcccctcaccacccagatgagcagaggcatacagatcagctgatatacccatataagcccgaaataggaatcatagatgcccaatttctggaagagcataaacagaggcagcactacgaggatctcaggcgcaaatttaaaagacagtatctggaacgcgatgtcttcctttttcttaaaattatatctcgccagcgcgtacgcggcaggaactcccgcgacaacggagacggctaccgcgcctcccgcgacgatcagactgtctaacatatatttcagatagtccgactggaatatgactgctctgtaattgtccaatgtagggttgaatacaaatgtcgttgtatacatctgcgcatcgggcttgattgtcaggataagcatccataacaatggaaacaaagcaaaaatcgtatatatgactaacagtaaattctggacgacacggcccagcatttttttactttccatgttttacatcctttctgactctgtattttataactgttcctgcactcactgttcatcctgcccggaagccagtctctgagccgcacgctgtctcttgacgatctgttttgccacaatgttgataaatacccataggacaagtatgtatggcagggcaaacccaaatttctggaactggaacccggtctggtaagaggtcagagacaggttcatcagtgtatcgcccggtcctccttttgtcaggccgaatatgatggcatattcctggagcgccgccatgagacggaacagcagagcaatgtataagctcggcttcagcataggcagcgtcagattccggaaattaaaccatgcgcttccgccgtcgatcttcgccgactcaaacggtgacttcggaagagactgcagtccggcaagtacaagcagcatacagaatgaagtgttgacccatacgtctatcattacgaccgtcatcatcgccgtggatgcactggccgcccacggaaagttatatacgccgaagaagttcaggaacttttccacgattcctacagagttgttcagcatgagctgccagataatggtggcggtgatcggcgcgaccatcagcgggaatataagtacgactcttaagatcttggaaaagcggttctccagattgttcagcagcatggcgatcccgagtcctatccccatctccagcgccgtgctgaaaaatgcatatcttaacgttacccataccgatttccagaatccggaggattgaagtatggtgatccagtttttcaatccgataaagctgtacgtcggcatcctgaatgaatagctcgtcaatgagaaatatatggacattacaaagggtatcatgattccgatcgtaatgatcagtgccggagctactatcagatagggacgcattctcgtcttaaacggcactacattcagctcgctgacggcagcactgtcttttttctgctctttcatttgcgtttcctccaatttcagattttctgattctgataataaaaatattcgttcttaaaaaaatcaaggagggtcaggtaacccctccttgcctttcacccttaagtacaaattaactgctgttgtcgatttttaaggttattcagatacttccagatcagatacgatcgtatccagatctttcttaagctgcttcatggcatcctctgtggacgaatacttgtcggtgagcacaagatcctgaagtacctccgcccactttgtcgtacactcgaagaagtatggctgcggtgtgaactgaatggtcgcattctttgacagcacatcgatggattcaagatagttgtctgctttgccgacgatcgctttgtactcatcgctctccattacagatgtacgcggtgtatccgggcttgccccgtcagttcctgcgtaaagcatgtaatccgggcttgtgaaatactggataaagtaccatgcggcatccttattttttgagtcagcgttcatagccagtgaccagatccatacatttgctttcatatcagcttctgtctttccttccggaagcggtatggttgaccatgcaatattgcctgactgatcagacgcgccttcatagttctggaaatagcctgcgcttgtagcgtcgaataacatggcggcttttcctgcgccgaggtctgaactggcctcataccatgtatagttggaccactgcggagcgcctgcttctttgatcagttttacccagtagtctgtcatttcgatcgcttctttggaatccagctgacataccagtttgccgtcttcgatcgcaaagtcttttccgccccatgttgcgaataatgacatgtatccaggatgtatggtcgcccattcacgcgtaccgcgtactgcgatgccgtaggaaccggaaccgttgaattcattgagagatttggctgtctcaagcagttcgtccgtcgttgttggtactgtgatccctttttcctcaaacactttcttgttgtatgcaaggttatttaattcccatcccatcggaagcgcccactgagaaccttcgccaactgcatggcccggtacgaggtcccatttaagcggatcaactgtggcgctgataaaatcgtcataattatagtccgccgctgtcttggaagcgtcatttatgtaatcctccaatggctccatatagccggcagatgcatattcccaaacctgataagcacctgtcatatatacgtccggcgtaccggaacggctgctcagagacgtgttcagtttgtcaaaatagttggactcaggagtggatgaatactcaaccttgatacctgtcagctcttcaaactcttttatcttggaaataactgctttggaataattgtgttcattgaacattacgttgatcgtcgtgccgtcataattcttccagtcaaagtcttcggcctttccgcttgactttgcttttccgtcgtcacttccgccggagccggaaccgccgccgcatcctgccagcatggtaccaaccataactgcacacaaaagaacgctgattactctttttttcatactttttcctcccttttgatacatttgccgcataaaaaagtgcttcatttttcggtttacctgcccgattttttatgcattttgtctaacgtcagtatatctctcgccgtgtcatttgtcaagctttttgtcatttgtcttattttatgcggattttaaagtataattgcactaataatcattgtttttacagtattattttgtttgtattttctttaacgacccacttttcctcttgcggcaatataagttttattgtatgattactcttaacttgtgaaagacacactttcgttttggaacggaggccgctcaaaccagcggcacatggaggaacatactatgaaagtatttgaatacgacagcagttttatgaaatttatacttctcttaagccggcttacagtattaaatatcatctggcttttatgctgtatcccggtcgtcaccgcaggcgcggcgaccgcggcccagtattatacggccagccggattctcggcggtagcacggaagtctggcaaaatttcaagaccggcctgaggctgcactggaaacgctcctccgttatctggattgcctttgcgctgcttaccgccgtctttgctgcggaatactacatactcaccacagcagccgttcccggcaaaacagcgctccttgccatatccggcctggcttttctcacagccgttctcataatgctgtggatatacccggtcatgatcaactttacgggcagcctgggcgaaatactttttaactcttttgtgttcaccttcatgtacgcgcccatcacccttatagctgctgctttttacggtgtcgccggctttttgtttatccgcttcaacttcacaaaaggtctcttcgtcctgttcggccagtcgctgatcgtatacgggatactcgttctcttcgaaaaagtgctcaggaagtaccggtgattagattttaggttgggggatttgggaggttggtagtgtacggcgccggggcggtaaactgggggtgcggctggtcggtgcgcttgcaggcggtaaggaaaaagaacggggcgtacgcagactccagatggaagcggaaggaaatctggatgatttccttcctttgccatctcaaacttcggacttgtggtccgaagtttggtctgtgtacgccccgttcttttttctaaccgcctgacaaagctccctccaacagccacacccccagtttaccgccccggcgcctgatactacaaatgctcatatctcctcaacacgtaagactaccgtatgactgcaatagatttacataatgattgaagctaaatattggctttcggaaacaagtttatctattgagacaccctgttgaattcatacggttgggacagttttagcacttgggggataaacaggcagagcgggcgggggcacagggaggagttaagggcgttcggaggcagatgaggaagccgttgctgcggaaagagccggaatcagacacgggaatgttatcacaaataacattcccgagagcctctgagggaggaaatcccttcaggatttccttccgaataggctcggttgtctgattccggctctttccgcagcaacggcttcctcatctgcctccgaacgcccttaactcctccctgtgcccccgcccgctctgccgtccgccgccattacccctaaactctgccaaccaaattcaaaaagtaaaagccactttgaagtcgccgtattttcctgatgcatagtcaaaagccttctcccactcttcaatggcaaaggtgcttgacactacgcctttagtctttaagttacctttcatcatattgtcgatcacgaatgggtaggcgtacggactcaggtgcgcgccaagtatatccagttcctttctgtccccgatgatggaccagtctacggtcgtctcggaaccgaatacactgaattctacaaagcggccgagctttcttgtgatcgtaagtccctggatgacgctggacggatgtccggtggcctcgatatatacatcgcagccgtagtcgtctgtcaatgcttttatttctttgtctatgtcacattttccggggttgaatacgagatccgcgccaaattcttttgctttttccagacgggcatcctgcatatcaagcacgatcagttgtttaggatttttcattctggcgtatgtgatcattccaagccccagtgtccctgcgccggagatgactacaatgtcttcgtttgtgatgcttcctctgtctaccgcgtgtttggaacagccgtaaggctccacgagaagcgcctgctcaatgctcatatcctcaggcacacggctgatgacacagttcttcggatatcttacatactctgccataccgccgttattgtctgactggaatcccagcatatcgtgaggctggcacatccagtaatggccgtccttacagaaccggcacttgccgcacggaacgatctggtccgcgatgatcctatcgcccagttcatacccttcgacattttctcccatctccacaatgcgtccaaagaactcgtgtcccggaataaacggaggtttcacccatgaaggctgtacttcgtctccccagaacattgccgctccgtggctgcacttcagatctcccgcgcatataccgcaggcctctgtcttaatgataatgtcgtcgggcccgcattccggcgccggatattccgcctcaaaacggtagtcatccttgctgtatgccacaagcgccttcatagtttttggagtccttccctgatttgccataatgtttccacctttccttttatgatgattatgtttatacttcaaactgtccccagacagtatcaagcgcccggactatctcccggtatttttcgtactttctctgatagactgcagtcttcgcctcatccggatatatccggcccgatacgtgcaccatatgctcagccgcgtctttatagtctttgtatacgcccgccgcgatggccgcggccattccgcagccgagggcgcccagttcctttgcctccaccgtctcgatcgggaagccgagcgcatccgcgaacatctgcacccatacgccggagtttaccgcgcctccggccatgcggaccgcctccggcggctttctcgaagacagcagacgctcaatatgtgtcttatgggaatacacgactccctcgtaaactgcccgcagcatatgcgctttatcgtgataagtcgtaagtccgacaaatgctcccttgccaagcggatgcgcgttagatccatagaggaagggaagaaaatagacctccgactcctccggcggtatgctgtcaaccttttcattcaccacgtcgtatatatttttaccttccggtatgtgctcatgttccatacagttttctaaaaaccattccagattacctgaggatgtggcgctgcactcttccacgaggtaatatcccggcacggcgaaaagggaattcatggcaatgcttccgtccatgaccggcgtctcggagatatattcgttgatactccacgtcccggcaatcgtacacaattcgtccggcgacatgacattgaccgccaccgcacacgcgtcaatgtcgaacattccgcctgccacaggcgtaccctccagaagtccggtaagctttgccgcctcttttgtgatcgtcccgcacagatcataggagtatctcaccggcgccagcttctcatacacctctcctatgccgagcttttccagtatctccctgtcgaactgtgcatgtttcacatccatgagcccggagccggatatgtctgtcgcttcactgtaagcctccccggtaaggcggtaccggatatagtccttcacggaaaatacgtatttaatattgtcatatacatctctgtgatgctctttaaaccacgcgagaagcgccacctgctgacaggccatcagttcctggcaaagctgtccgcgcagacagtcatagactccgttctcatgccatttcttcggatatttccatgcccggctgtcggtggaaatgatcccgttatacgcaggtttaccgtttttcccccacgggtacaggcccttgccgtgtccgcacacagcgatcccaagcacgtccctgccgtctgtccccgcttttaaaagcgcccgttttacacagtcacagtttgccagccacaactcttccatatcccgctccgtataaccggatcttggggtgataacttttgtctgcctgcccgcagaggcaatttcttttccgcttagatcaaatatggccgctttcgtagaagtgccgccattgtccaggccgatcacatactttcccatattcagaactcctttccggacgccttacgcgctgatatcttctggtattccgagcagctgcctcgccttttcaaactgtctgtccagaaactctctgttagagcgcgcaatttctctccagttttcttccccgcagtaccaatactcagcgacgtaccttctgactccatgctcatacagttttgcgatggccccgggaaagtcaacctgccctgtcccgtaagggatctccctgaactttcctatcacggtctcttttaaatgggccgccgctatatgccccctgccggtggtgatatctcctgccacatctttcgtggcattggaaatgttgccgatatcgggatacacctgcagataaggagaattgacccggttcacgctgtgcatcgccttttccactgtattcataaaatcattttccatcgtctccatagcaagcattacaccgtgggaggcggcaaacatcgttccctcttccagatttctgtagaatctctcccgcgtcgtcttatcgctcgtctcctcgtagtaacagtcatagccctgagtctggatgatccggatacccattttccgggcaaagagaacgccttttcgcagaagctcctttgcctccttttcccacttcctgctgccgagcgggtattttctctgtgcactgaagcagatagtctcaattgggatcccaactcgtttttctgtctccagcagctcatatatctgctcgtcgcaccagtcaagccgcgacatcctcatatcagtctcgtcaatactcatctctatataatcaaaaccggcttcctttgccgccgccaggcgctcttcccatgacagttccgcaggagctgctttttcatagacgcctaatctgtatgtatccttaaacgacataccatccctccttctgttgttttgtgcactttatatactttaacttgttttacaagaacaattatacgattactgcacaaaaaaagcaatgacatttttcatttaatgttacatttgtaattttaggacaggaaaaaagcagtccagactctgtaggatcacacaaagtctggactgcttttttcctgtctatttctccggtgcagcttgtatacagttgtcagccacccactcttttactttttctctgaggatgtaacgcctgacagactcctccggcgcttccttttccattgcttttacatcctcatatcccatctcttctgccagttcttttttcgcctttttatacgctttatcatcgagctttatatgctctttatctgctatcagttccaccgtcagatcttcttttacattggaacgggccgcctcttctgccttctctttgaactctgcctccgtcatatccatcttcgacaaaaactccgcaaaatccatctcgtacatatccgcgccgtcctcataatggtcgtaaaagctctgttcctcctctttcagccggtccttcggatattttttcacttctgtattttccagtacctgcttccacgctgaatccatgagttcactctgtatgtattctttattgttttcttccagcagcttccgtacctcttttctgtattcttcgaccgtatcggacttctgtgagatcgtccggacaaattcgtccgtcagctcgggcagttccttttccctgaccgctttgaccgtgacatcaatggatgcttttttccctgccaatgtcttattattgaagtcgtccgcaaatgtatgttcaatgttcagtgtatcgccggcgttatgtccgatcagattatcgtcaaacccttcataaaaagaccccgaaccaaccgtcagctcataatcgctgcccgatccgttttgtatcggctgtccgtctgctgacgcggtatagtcaatgatcacaacgtccccctcctgtatcgctctgtcagtgacgtcttttatttccgcaaatccttccctgaccgtttcaatattatgatccacggactcatccgtaatgtcagggatgccctccactttcggcacctccacccctttatattttgataccgtgatataatcattagatatctgccctgaaccgcagcctgctaacgccgccgctgtcccgagcagaaccgcacataccaacattctttttctcataccgttcccccacctctcatttttcttctcccgggatcagttcaggccccggacaatgtatcgctataccatcttgttataacacatttttccggaacaaaaaaggaaattcatacatttttcacattaaattacatttgtccgtttttcatatacttattagacagacaatgtcctgtctgctataattcaggaaacaggccgcgcctgtaaaaacagcatttacgcagtgggggattgatatgattaaactgatcgcaagtgatttggacggtactttacttctgaacggagcccagcggctgaacccggaagtttttgacctgatcagagcattgaaggaacacgggatcttatttacggctgccagcggacggcagtatacgaatctgcggcgtctgtttgctccggtcaaagacgatatcgcctatgtggcggaaaatggttccctgtgcatctatgaagggaagacactttctaaaggaatgatcggccgggaacttggacttcgtattatcgacgccgtgcacagctacggccgctgtgagtgtatcgtatccggggagagagtgtgctatacggattcccgcgatacgcgctttaaggaacatatgctgcatgttgtcggaaatgacatggaatttgtctctgatctgaaagaagacgtacatgagccgttcttaaagctcgcactgtgcgactttcaagggacgcgcaaaacagaggaacatttcaaagcgttgttttctgatgagataaagatcgtgacttccggaaatatttgggtcgattttatcacaccgggggccaacaagggaaatgcgcttcaggtactgctcgatcatcttcatatcgacgcgaaagactgcgtcgccttcggcgaccagtgtaacgacgaggagatgcttcagctcgcaggagtaagttacgccatgaccgatgcggcgcctgccgtcatacagcaggcttcccacacgacagattcggtcgaaaacgtgctgaagcgtattttagaagctttggaataaaatagtaatacgaaaaccccggggaaggcgcacccgcgtgcggcatcacatatctgccttcacgcgggtgcgccttccccgggattttatgatcccggtttatttattctgcccataataagcgtttgcgccatgttttctgtagtaatgcttatcctggagctcctggggagcgggcctgacctgtgggttgatgagctcacagcgggcagccatcttggccacctcctcaaggacaaccgcattgtgtaccgcctcggctgcgtttttgccccacgtaaacggaccgtggtttttgcagagtacggccggcatcgccatatactccctgcctttaaaatgttccacgataagaagtcctgtattcttctcgtaagcttcctcgatctcctcccgggtcagattgcgcacgcacgggatctctccgtacatataatctgcatgggtcgtaccgtagcacggaatacctcttcccgcctgcgcccagctcgttgcccactcagaatgcgtatgtacgatgcctcccatatccggaaatgctctgtaaagctccagatgcgtctccgtatcagaagaaggattatattccccctccaccttttcgccgtccagattcatgactaccatatcttgcgctttcagcttatcgtactctacgccgctcggtttgatgacaaacaggcccttctccctgtcgatcccgcttacattcccccaagtaaatgtaacaagtccgtactttggaagcagcatattggcctcaaacacctctttttttaacgcctctaacactttcatctcctcctttcccctctctgcttatggggtcagaatacaggtccataagctgctgtgcccattctaatctgcagcacaaattccggttaagttggaattctagcacaatctgccagttctgtcaaatatcagacttgaaatcttctgcactgtcttaagtaacagacaggttcttcttagaaagcctgcagagcactccctggggcaaaacatggacaacttttcctgccgccctgctgtctatcttatcataaatccgcccggcactcatgctctttccaaggacagtataagagctgttggcaacataacctatcttcccgagccccttcacttcaacagagatcgcttccttatcgtattcattatccggctcttttacgagacggaccttcattccgtattccagaaattcattgccataataatactttgtccctgtaactgtaaaatataccttttccatactgacttctcctccctatgttctttaatgttttttaatcttcttttacatactcttcataatctgcctcgcatgcaaacagcatataccttccgtccacacaccccataaaaccgttttcgaccatataccctttcatagctgctcatctccttctctctgatcaaatctaattttttatttttcaagcctcactgatctttgtttcttgttttactttacctcatatggtgtgcgataaaaatgccaccatcatttaacatatacgtggatccgaggtggctatatggttaagaactgatggggcagcaaacccggcagttcatgcgcgcgcaaaaaagagaggcttttcaaaaaagcctctcccgcctatatcttctttatttcacttcatattgctcagccagtctcctgatctcctccctgacctgccgtaccactttatccggtcctatgatctctgcgcctttcccaagagcaaaaaaccaccctacaaactgccggctgaccgccacatcgacgctgaccgtaaagtgctcttcgtccgcgggtattaaagagatatcttttccgaaccggtcgatgactacgccggccagactgttgtccataagaagttttacccgttcctcttttccgccgtacatggcgaaattttttctcgtataagctgcaatgtcaaattgatgaaaatgttcttttccttctcttggctcatcagacatcttaattcttatcatcttatctacccggtaatgtttgatgatctgatcttctgcatcgtatcctacaagatagtagttttcatcatcccagcacaatccccacgggctgatatgataatatgccccttcgcgccgcagttccatctccttttttatgttccactgataatactgaaacaggattttcctgttttccgcaatggcgttgtgtatagaatccacattgtaataaatgctttcattcattgttttgatcctgccggatacatagacctgacgctgcagtttcttcgcctcatattcactgcacataccctccagcttccggatcagttcatttgacttcttggctgtgataaatttagaagactgaatcgcgtccaccagaagttttaattccgcaagctcaaactgcctgctcccgacatgataatggtaagtctttcccacaggctctccgatgatctccacgcccatcctatccaatgtctgcagatccgcataaatacttctccgctccgcagtcacctcataacgctctagttccgccaggatctccggcatggtgatactgtggtcatcgtccgttttttccagcatgatcttcataagatagtatagtttaagtttttggttcgccccttttggcatctttattactcctttagcaatgcatttatacaatattttatctgttctatcataaagtaaaccggacatcacggctgttgggggcatcgttcatatcaataactgctgtctggacatcagaataggttaccagacgctggcgaaaagcgtgatagatagtatcgcacaattctttcagcagtttctcaaatttacctacctgcttattctcaatggcaagtatcataagttcatgatacttgaccgactggatatcctgcgcaatagggacataaaagttatcatatagggtaaggataatattcatttttttatagatactgtgaaagatgtcactcagatattgattctccgccttgtccacgatcgtagcgtgaaattctgtatttgtctccatatagagaggaaaatccctgtcttcaaatgctttttgttcctggtcaaggatctcctggagaattttgatatcatcctctctgaaggtctcaatacacagatgaacagcaaatatctccagttcgatcctcacttcgtacaactgacggatatcttcgatacttggctgtatgacaaacgcccctttgttgggaatgatctccacatatccttcctgcgacaggcgccgcagtgcatttctgacaggtgtcctgctcacatggaaagcatcacacagagactgctcaactaaaggagctcctggggccaggcgccttttatagattgcctctttaattttttcataagcctgtaattcataagaattttttctggtttccatatcattacccccggatttactaagcttctataattctaccataaattcctatatttctacattacttattttgttatttcccgccggtatccgtattgtatatatcgtgggactctatatcctgttttttgctaagcggaaggaatttcccagtatacccgcatattaacaccagtatcatagcaagccagtgattgaacatatagggagcatactgataccatgcgactccaaaagtgctcagcataataatggcgccattgctccagggcacgatcgcgccgaaattggaggcacactctgtaagagtccgcgccagcgcaatcttgtcgatcccttctttctcgtaagcgggcagatacatacgtccgttcatgatggtagaaacatagacgctgcttgtcatgtaaacgccaagtacagtagtgatcatgcttatcagtataagattgcctctactctttgcaactttaatcaatttttcaagaatcgcatccaacagccccattgattccataatgccggcaaatacaaacgcgcaaaacagcataaggatcaatgacatcatgtaagacaggccgccgccggagagcaggccgtcaatcgcttcatttcccgtggtaacagtatacccgttgtagagggctgacagggcgtctgttacagatgaaccctggatcaggatcgaaaatacggttccgatccctgctccgatgaccagtaccgggaaaatgggtttcttcataaccgcaagcactacaacaactatgagcggcagaatcaatattgggttaaatgtatatgtatcttcaagagtcgatattatctcctttgtctggcttgcatcaaaagtcccgtgtgtacccatcacaaaccccataactgcataaatgactaatgctatccctgcgctgactccggatgtgggaatcatacagccaaacagccggaatgagttttcctccgtgacagcagaggccagattggtcacatctgaaagaggactccatttatcgcccagatacgaaccacagcagattgcagctgcggccgccggcgcagggatcccaagaccatttgccactcccatgagggccacaccgaacgtagccataattgcccatgcagaaccggttgccatacctcctatcgcagtgatcaaaaatgtgactgccagataaatagatgggtttaatatcttaagcccccaataaatcaaaataggtgtagtacctgacgaaagccaggaaccggaaatcagacctaccatcagcaatattaatgtggcgggcattccgatcccgataaccttcaaaatccctgtctgtatctcattccacgatttatgcagtacaatgattccgtacagagccgctgtgaatgagcagaggcagatagagataccagtcgggatccccgcggacagcgcaccccacatcagaattgcaacaaaagcaacgagcagcccaattgcttccggaaatttaatctttctagattcacttatttttcccataacaacttctcctttcttggtatcttgcataccttacaggcaattgagcagttcctgacaggaaagatcaccaagtcccagcttatcaagtgtccgcgctctttctgctctgtaatccctctgcattatagtggatgcgatcgtaatgacagaactgatattggatacttctacgccaaatttccggcctaattcttcaaacagaacaagcccgaatcccacatcctcgtggaagtaccgggtgtccagtttctgaggggctttgactcctttgaagcctggtgcgctgcggtaacagttttcatagtcatcctcaataagatacccttgtttctttgtcaataccggtcccggatacaggtcaaatcccatagcctttgcgatagacaaccgttctgtatcaatactgcggatcagacgccctacgcttggctgaataccattttcatagaaataaaaatcgcctccggtagcttcgatccacgccgccatcatcagagttccggcaggatgaattgccgggttcccgtttgtcaatgttgtctgaagtacatttttggcaggaacacaagggttgacctgattgaatatcctatataattcatccgtatattttgaggggagcgctgcgatatagacccatcccgtcagtttatgatatacctgtattacccccggatccattaccctgcaggcatacggcagggtatgggtctctcctgctattacgctttcatcatcgtaattaagtcccaacgcctttttgaagatcaatgcccctccgcatgaaccggggacaataatgaccttctgtccatatggaagcttacctctgcacgcttttccaaatgattccgtactatatgcagggcctaccacatacagaatatcgcatccatccaacgctctgtcgatatcacagccacagtaagataattttgcgaatccttttacacaaccggaaacagcaatgcctcctgcttcattgaccgcgtcaatattagcagagaactgtttaaagtcaaacagcctgacttcatgtcctgctaacgcccagtccgccgccagtgtacacccgccgtttccacttccaaatacagtaaccttcatagtttttctcctttctcacgaaatatgtagtataatattgtagtacaattttgtttaaaaaatcataccacatacaatagttaatgtcaatcaatattctggcaaattatattttataaatattttttctgtaaattataagttaatagaaataattaacggataatcgcaaaaagcctgccgcatatctgcggcaggctcctttattaattatgtatccctcttctatttacggcttccgcctattgtcaattccttctttgtttttgatattgtaagggaggaatctccgtaatctgtacttgcatacataccgcctccggaactattcatcatgccggtcacaatatcgttaactgtgtcaaaatcactgtctggtataaagccggccacacaacaataccactcaccggcaagcttgttagcatctactgtgatccatgcttttttataccacataaatgaacttatctcatatttgcagtccagttcttcatctgaagatctgttaaatgtcactgttgcgccaacccctgtttctattttattgtctgaagcattgtccgcacttagtttagcaacacccactccttctatttcatttataatatctgccatctcattatatctctctatgaatttgtttaaagaatacggactgttgaccatagcttcaaccatagcttcactgtccttataattgagtttatccaaatatgtcaatgcattttcataatcctttttttcgtacagctctttaccgagtatatatttacattcggcaagcagctccttactgtcctcataatcaccgacttcttccagattatttatagcttctttgtactgtttgtactccatgagtaaaaccgactgcctataaacgccttcctgcactgctgctttcacttcttttcctgagcctgcagattctaatttttccaaagccaatgaatactgctccttttcaattaattctcttccccaatttaaataacacttttctatcatttcatctgaatctttatacccgtccaatcctttaaatacacttactgcatctttatactgtttattctctaacattttttccgcttttgaataagctcttagatttgaagtggcaaaaaagacaataaccgcaataattattacagaagcggctactattcctattatttttttgttcttaccggataatttactgttttcaacatcttcatggccagcatcttccacgatttcctctgtgtttcccgcatcactgtctgtttttggaatagaatatccacaataaatacacttcccgctattatcgtctgtctcctttccacatttcggacatttcatcatcgtcataaccttttcctccctcacaccttttaatctttagttaaatgccgctgacattttattgttgaaataattctatcatatttcctgataaatcgcactattttaatggtcaaacaaaagtcctcagaagcttatgcacttctgaggacacatatgaaatactatctatttagatatttatacttagtacagcttcgcacctgccgggattctgtcatctaccatcaaaagattcagtccttccctgccgtcttcctcatgaactgctgagatcagcattccgcaggatgcaattcccatcatcggtctgggcggcaggtttgtgatcgcgatacaagtctttccaaccagttcttccggctcgtaatattcatggataccacttaagatcacgcgttcggcgtccgttccgtcatcaaggacaaacttcagaagcttcttgctcttcggcacagcttcacaggcttttaccttgacggctctgaaatcagacttactgaatgtctcaaaatctaccatctcttcaaataacggctcgatctttacgttagaaaaatcgatcttttccggcgctttatcagcctccgcagctgctgatccttccggcgcggctgcttttttagaaacgtcagtaccgccgatgctcttcattgtcgggaacaacagcacgtcacggatcgccgccgaatccgtcatgagcatacacatccggtcaattccgaatccgatccctcccgtaggcggcatgccgatctccagcgcgttgaggaagtcttcatccgtagtattcgcctcttcgtccccctgggccagcagttcttcctgcgccctgaaacgctctctctggtcgatcgggtcattgagctcagagtacgcatttgccatctcccagccgttcatgaagaattcaaaccgctccacatactccggatcttccggtttctttttcgtgagcggtgatatctcgatcggatgatccataacaaacgtcggctgaatgaggtgctcttctgcaaactcctcgaaaaacagacttaaaatatctccctttttatgcctgtcctcatattctacatggtgcttgtcagccagcgctctcgcctcttccagcgtatgcacttcattccagtccacacctgcatacttctttacggcatctgtcatggtgattctttcaaacggttttcccagatccatttccacaccgttataaacgatggtcgtcgtgccgaggacttcctgcgccacgtggcggtacagattctctgtcagatccatcattccgttgtagtctgtatacgcctgatataattccatcagcgtaaactccgggttatgtcttgtatccagtccttcattgcggaaaacacgtccgatctcgtacaccttttcaaggccgcccacgataaggcgctttaagtaaagctccagagaaatacgcagcttaaagtcttcgctgagcgcgttaaaatgcgtctcaaaaggcctggcggccgcccctccggcattgctcacgagcatcggtgtctccacctcgagaaagccctggccgtccagatatcttctgatcgcgctgattatgtgggagcgctttataaaggtatccctcacctcaggattcatgatcaggtctacatatctctggcggtagcgggtatccgtgtttgtcagtccgtgaaatttttccggcaggatctggaggctcttggagagcagctttaccgcggtcgcatgtatggagatctcgcccgtcttcgtcttgaacacttcaccttccagccccacgatatcgccgatatcaagcttcttaaactctttgtacgcctcttctccgagactgtcccttgcgacatacgactggatgtttccgctctggtcgaggacattacagaaagacgccttacccatgacgcgcttctgcatgacacgacctgccacagatacgtgctttccttccatctcatcataattttcctttatatcggcggcatggaccgtcgcctcatagcgcatcacctgatacgggtctttgccattttcctgaagctcttttaacttttcacggcggaccttcctcaactgatttaagtccggttcctgtacatttccctgctgtttggacacgatactctctcctttccgtttgaacaggtcttctatgttttacattgaacggcttatttcaagaaccttgtaagccatctcgcctgcctgtgtttctactttcacggtgtctcccaccttcttgcccatcaaagcctggccaaccggtgattcgttggagattttaccttccaggctgttcgcctccgtagaacctactattttaaattccatctcttcatcaaatgtcttatcgaatactttcacagcacagccgacattaatcttatcgaaatccacttcgtcttccactacgacttctgcattcttcagaatgccttccagctcttcaatgcgggcttctatgtcacgctgctcgtccttggccgcatcgtactccgcgttctcggacagatcgccctgctccctggcttctttgatcttgcccgcaacttccttccgctttacgaccttcaaattctccagttcatcctccagtgccttcaggcctgcataagtaagtaattttttctttgcttccatgtctctcttctccttaatctacacagatttctgtctctattctttcacaggtcttcctgtatcgtccttactctgctgtctgtatcgaaaagatactttcacaatttcattattatacataatcggacgtctaatgtcaatcatttttcgatacgataaattatcttacgttttacagaaaagccctgcctcacatattggttaagtatatgtaggacaaggctcttttattatctcaaatttatccagcgagcctttcaaagagcaggtgctcaagctcctcatacgactctacactgttgatctgggcccgcagctttgaggcgcctttcaatccctttgtataccacgccacatgttttctcatctctctgatcccgaggtattctcccttgtattccatctgcatccgcgcatgcttcagcatagtctgccgcacttcagcctcaaccggacgcggtaaaaccgtgccgtctgccgcatatgccctcagctcacggaagatccacggattcccctgtgccgcccggccgatcatcaccatgtcacacccggtctgttcctgcatggctgcggccgaagggccggacaccacgtcgccgtttccgatgacggggatcgagactgcctccttcaccttccgtataatgtcccagtctgctttcccggcgtaatactgctctcttgtcctgccgtgcacggccaccgcggcggcgcctgcttcttctatgactctggcggcttccaccgcattcacatgttcgtcgtcaaatcctttgcggatcttcaccgtgaccggtttatcgatcgcttttaccgtctcgtgtacgatgtcgtatataaggcccggatctttcatcagagcagaaccctccccattccttacaactttgggtaccggacatcccatgttgatgtccagtatctgaaacggaagctcctcgatccgctttgccgcctcgcccatgatacgcggatcagaaccaaacagctgaagggagaccggatattcttccgggtgaatggcgagcagcagcttcgtatttttattattgtactgcagcgctttcgcactgaccatctccatacataaaaggcccgccccctgttctttgcagagcagacgaaatggcaggtcggttacccctgccataggcgccagaatatatggattttcaagctcaatgtttcctatttttttcataaataatcctcagtccctttaatgtcagctgggaatcatagatatcgatcacgtctgtctccgccgcgattatcttgccaaggcctccggtggcaaccaccttcgcgtccatatagcccgactcttccttgatcctgtttacgatatattccgtctggccgatctggccgaacacaagccccgcctgcatgctgctgatggtttccttcgccattatggaatccggctttttgatctcgatcgccgggagcattgccgcccctccccagagcgcctgcgcagatgtccgaatgcccggcgctgtgaccccggcctcaaatgtaccgtcgatgcccaccacgtcatatgtggtggccgtgccgaagtccagaacgatgaccggccctccgtgcagtgtataggccgcgaccgcatccacgatcctgtccgacccgacctgccgcggattctctgtcacgatacggatgccggtcttgatgcctgctgagactacgatcggtttgataccaaaatatttgataatggaacttccgagggaatgcataatgtccggcacaacagaagcgatgatgaccgcgctgatatctgtgcttaagattccctggcgctccacaagttctttcagtgtgatcccgtattcatccgacgtgcggggctgtttcgtagtcatacggaacgttccaagcagttcgtcttctttgaatacgccaagcgtgatattcgtgtttcccacatctataacaagtaacatatctgcctcctatacgtcctcgccgaggaaaaatacacggtagtacagctgcagggcagcgagcagttcctgtttttccctctggagctcttttatcttaagctggcttcctatctcatcaaacatcgggtcgccttcctcacttgtcacctcaaagcagagctctgcgtcctcctcgtaaacaagcgtaagtataccgccaacatcatttacgtacagcacgcacatgatcttcagctcatcttttatcttgccgggcagctgttcaaaatccgggttcaggtaatacttctcttcataagaattggctccgcagagcaccactttattttcatacatatccatatactcctcttacagatacttctcccgcgaatatggcccgcctggaaccatcctgcgccgtgacgatcagctctcccgtatcattgatgccggaggccaccgcctcatactcatttccaggctccagaatacgcacctcttttccgcggttgacgagcagccggttatacgcgctcttaagcctggacagatcctccgccgcgagaaatgtctcataattttcctcataccgctccataattctggccgccagctttgcccgccttactctggcacccccttctatatacagggaagttgccgtcccggcaatttccttgggaaaacattctgtgtttacattgatgccggcgcctgtcactacataattgatatagtcgacttccgcgctcatctctgtcaggatgccgcacactttttttctgttcactacgatgtcgttgggccattttatctgtgccaaaagcccggtctcgcctgtaatgccctccgccacgctcagcgccatgacaagagtgagcatgggcgccctggaaggaagaaatccgggcctgagcaggaccgtcatatagatgctcgtcccggacggcgattcccagctgcgtccgcgccggccttttcccgcagtctggcggtccgccacaaagagcgtgccgtgtgacgcgcctttttctccaagcgccttggcctgtatattcgtagagtctgtctctgacgcatataccacaggccttcccgcccagcgcgtgcggatcaggctttcaagctccgcctgtcccatcacatccgggctttctacgaggcggtaccctctgctgcgcaccgcctctatctcatacccttccttcttcagctgttcgatcaccttccagacagctgtccgtgatacgccaaagctgtcacagagctgctgcccggacacatatcctccgctctcacggagcactttcagaatttccgtcttcattgccttctcctagatattgccaagtgtcgccaccataaccgctttgatcgtatgcaggcggttctctgcctcatcaaatacgacagaagcatctccctcaaagacatcctccgtcacttccttacccttgactgcaggcaggcagtgcatgaatatcgtaccttccttcttcgtccttgccatcatctctttattgatctgatacggacgaagcatctcgatccgctcagccgccttgtcctcctcgcccatagaagcccacacgtctgtgtataatacatcggcgccttccacgtcattgacatcgtctgtgatcatgatggaagcgcctgactcggccgcatattttttgcacaggtctgtcagttcttcggtcggccacagagcctttggcgccacatttataaagtccacgcccactttggcacatcctatcataaggctgttggccatattgttgcggccgtcgccgagataagcaaatttcagccccttcagatatccgaagtgttctctcatcgtgagaaggtccgcaagtatctgtgtcggatggtactcatccgtcagtccgttccagaccggcaccccgctgtattttgcaagcgcctctacatgcgcctggctgaaaccgcggaattcaattccgtcaaacatccgtccgagcacccgcgccgtatcttcaatactttccttatgtccaagctgtatctcgctcccggcaagataggtcggatttccgccctcatccgccgcgcctaccgtgaacgcacagcgcgttctcgtggatggcttctcaaatatgagcgctatgttcttgccctgcaggctgtttcctgtgatcccctgttttttcttctcctttagatccgctgccagatcaagcagatatacgatctcctccggtgtaaaatccttcaatgtcaaaaaacttcttccttttaaattcatcttccgttcctctcttaatcctgttaatatatgaacaaaacgcggcaggtgcagcttatcacctaaaatttcatatttattatatacaatatcatacaattggtccactgtgtatatctgatatttcggaacacgcagtaatttggcagccgcctccagcatccccatgaacagctccttgtcagagtgcccgaaggaaagcttcagggcaaatgccgtctccgccttctcgatctctttgataccgctcatgagcttctcatagtagtgatcgtcatacgtctgctctacatagtagataaatccttctagtccgtacagcattctctttgcgtcaaagtaaccgatcttcatgttctgccggcttctcctgccggaaaattctataatgcttccaagctttaccctcggaccgatctcgtattttaccccggtctcaggcatctttacccggggctctctgcccggcccgtatatacgcacttctatgatattctcatagccccttttgacgagggaactaagcggcacattattgataacgccgccgtcgatatactttttgccgtgaagccgttcatttttgaagccgatcaggtaagcgctcgccagaagaaattcttccagcagcccttccgggatatcttctacactcaagtccagctctttaaaatcagacactgaaaaagtcagcaggcagaattcaatgctgctgttccttatcttctcttcgtctataacctcatggatcagctctttgagcggtgttatgtcaatgccgccgtctttcagtcggctccatccttcattcaaaaactcgcggatcgtcgtctccttgcggaacagacgctccatccattcgtcgtccacatccatcacggaagaaaacgtcatcttgctccagatgtcttccgccttttccatatcacccatgcaaacgagggcgccatttaatgcgcccacggatgtccctgccactgcattcagcttcaccccggcttccctcagggccttccacgcacctatctggtacgcgcccctcgctccgcctccgtcaaatacaaggccatattcttttgataaatctatgatgggtttcagctccatcacaccctttcatactactcctgtgcttcgtccttctgtccgacctctgccaatgatttaacaagtcctgctatgctctggatctctgaaggtatgatgatcttcgtcgccttaccgtccgccgcgcgctcaaaggcttccagactcttgagcgtcagaacagcctcatccgcgcctgcctccttcaggaattcaataccatttgcatttgcctgctgcaccttaaggatggcttccgcctcaccttcggcctcgcgtatcattgcttctttcttcgcttccgcacgcaggatcgccgcctgcttttctgcctcagcatcgaggatagcagattctttatgtccttccgccacaaggatcgtagacttcttctcaccttccgcgcgcaggatcgcctcacggcgttcacgctctgccttcatctgcttctccatcgcatcctggatcgctgccggcggaatgatattcttaagttccacacggtttactttaattccccatgggtctgtcgctacatcgagggaagaacgcatcttcgtgttgatcgtctctcttgatgtaagcgtctggtccagctccaggtcaccgattatatttctcagtgtagtggcggtcagattctcgatcgccatgatcgggtttgccacgccgtaacagaacagcttcggatctgtgatctggtagaatacgaccgtatcgatccgcatcgtgacattgtcctttgtgatgaccggctgaggcgcaaagtccaccacctgttctttcatatctacttttcttgcaacgcggtccacgatcggaagtttgacatgaagtcccgtactccaggtcgcctgatatgcaccgagtctctcaatgacgagcgcctgcgcctgtctcacaattctgatacaggatatcagtatcaaaacgactatgactataacaactatacctgtgattttaccaattaatgctcccattatgccttctcctctctggctcttacgataagcttcactccttggatcccttcaactacaactactgtgttcttttcaatgcggccctcgggctcatctgtcttagccgcccactcctgtccgttgatctcgactcttcccttagactgaagtgtgtcgatatcctccaggacaagtgcctgctgtccgatcaggctctccgcattggtcttctgacgttccttgttaaaatacttgaccgcgatcggtctcgtgacgatcagaagaatcacggacactaccacaaatacgattatctgcactgctgtgccgaacccgagcacaccggccgcaaatgccacaagcgcgccgccggcgaaccatatggtcgtcaggcccatggtaaggatctcgacgatcaacagaatcacaaataatattaaccaatacatcgtctgcatatgctgtcctctcttttcttgtaatagtattcctcatgtctattttactatacttctgtctataaagcaattattgttgccgtctctgcctggccgcctcaaacatgagcactgcggcagctgtcgccgcgttgagcgattccacctctccttccatcggaatgcggatataagtgtccgccagagcggcaacttcctctctcagtccgctgccctcgtttccgataaaaaatgcgcacggcttcgtaaaatcagcttcgtcgtaagagaggactccgtcaagatgcgccgcgtatgtatggataccgctctccttcatccgacgcaccgcctccgtcaggtctttggcccggtaaagcggcatccggtagaccgagcccatcgtagaacggatcgtcttcggattgtacacatccacacattcactgctcataacgatccccgtcaccccggcgccctcggccgtccggatgacagttcccatatttcccggatcctgcagattgtcgagaacgaggatatgcgccctctctcctcctgccgcctccgcaaatgtatactccttctgacggactacgcagagaacaccctgcggcgtcttcgtgtcggatacatagtcatagactgtgtcagacaatatctccgggcgtaccgcgcatccttccagcacacggcttactgtgccgccctcccttttataaaaggattccgacacatacacttctaagagccgcttcgccggaacttccctgaacatccggataccctccacaagaaatactttttcttcgtctctggccttcctctttttcctgagatttacaagccgttttaccttctggtttccagtacttgtgatcatcacaccttcgcctatcctttctgaaagctttccagcgcctcgttcgctccgacgaggatcaaaaccattccctgttccagcggcttattcggatccggattcacttccaccttatcaccggacacaacacctactacgctcacatcatgagagcgccggacatccagctcctgcaggctctttccggtccagccgtccggtacggccacctccgtgatactgtattccggagaaagcgcgatccagtctgcaaaattagtagatacaagattttttgcgatccgctctcccgtctcacgctccgggaacacgaccgcgtccgcgccaagcttcctcagtatcttcgcatgcatctcatttctcgccttggcgagcacatagggcactcccagttccttggagataatggtggccatgacgctcgcctccatgtcctcggagaccgcgatgatcacgccgtcgagattcctcgcccccagtgaccggatgacctcctggtcctgcatatctgcctgaatcgcataggacacatcatccgcgatctcctgaatgcgctccatcctgttatctaccacaacgacctcacagccaaggttctgcagcgtgaccgccacactggaaccaaaactgccaagtccgaatactgcatattgtttcgtcatattctgctccttgctgtcgcttaagcctcctgggcctgcaacactgattctaacctactatgatcctgcgctccggcagccttcgtatcttatctcttggatgcaccttcccgccgaacagtagcgccagcgtgatcggtccaagccgcccaagatacatcattaccatgatcaccgcctggctggcccggctcagatgcggtgtaagatcggcagtaagtcccaccgtcccgatggcggaagacgcctcgtacaatatgccgatgaacggcacactctccggctcgatcaccgtgatggccgtcacaccggcaaggaacgccgtaaacgccaccagcactacaaagaatcctgtgcgaatattggtattgtcgatcctccggccaaagcattccgtatcgcgcccgcctctcacaaaagtgaagcatgccagcacgagcatggcgacggtcgtcgtctttacgcctcccgccgttcctcccggggatccgccgataaacatgagcatactgcagacaagctttgactccgtatggagcccgccctgggatatggtggcaaacccggccgtcctcgtcgtgacagactggaacatggaagccatcaccttttccccgactgtcatgtttcctatcgtgtccggattatgatattccagcccgaatacagccgccgttccgagcacgagcaggataagcgttgttacgatcgctatcttggaatgaagtgcaaggcgggtaaaccaccatttttttggcacttcatttttatagatctttctgctgttgcttatgacatctgtccataccgtaaatccgataccgctcagaatgatgagcagcatcgtcgttatgttgatgagcgggtttgtcacataatccatcaggctgctgctgccgagtatgtcgataccggcattgcagaatgcggataccgcatgaaagactgaataccagataccctttgccacaccaaattccggcacgaactggacggcgtacagcacagcacctgcggcctccacaagaagcgtcccgagaatggcccgcctgaccatgccgaccatcccgccgatccggtccatattataagtttcctggatgacgacccgttcccgcacggtgatcttctttctcaggataagaaaaaaagcagtggcgcaggcgatgactcccaggcctcctatctggatcagaatgagaagaatgatcttcccaagcagcgtaaactgtgcggccggcgtgatcgtcacaagccctgtcacgcagaccgctgtcgtggacgtaaacaaagcatccgcaaacgcgatcggcttctcattgcatatcggcagccacagaagtattccgccgagcaggatcactccgagaaacccaagcgtcaaaagctgcatcgtattccacctgatattcttcctgcgctcacccatgaaccttttctctccttgccgtcacataattaccattagtatactacaatggtctcaaaaattacatacaaatttttgccgcgggaaaccgggaggggcagaagcgtctcccggaaacgcagctttgaccggctgttgaaaaaggggcgccgccggccgaaaatgatctctttgaccggtggtgccccactatactcatgccccgggtaacgcccttatccggtatactatactttgaaccggtagcccactccccagatcgtctctatatactgcggatttgaagtatccatctccactttttcacggattttcttgatatgcaccgtgacagtcgctatatctcctatggattccatatcccatatttcacggaataactcctccttcgtatatacgtgattcggatggcttgccagaaaggtaagaagatcaaactcttttgtcgtaaatgtccgctcctcaccgtttacccatacgcgtcttgccgttgtgtctatcttcaggccgcggatctcaatgatattgttcacctctgccgcgcttcccgtcagccggtcgtaccgggccagatgtgccttcactctcgctacaagctcactcggactgaacggcttggtcatataatcatccgctccgaggccgagcccccgtatcttgtcaatgtcatccttcttggcggacaccattatgattggagtatttttcacatttctcacctgccggcatatgtcgaatccgtctacaccgggaagcatgagatccaggataaacaggtcgtagtcttcctccagcgcttttttgaggccaagttcaccgtcattggccacttccacatggaacccgctcagctccagataatctttttccagatctgcaattgcctcttcgtcttccacgattagtattttactcatgaatcggtacctcctgatattttcttagaacaaagtacatggtcgttccggtctcctcccggctggtagcccatatctttcctccgtgttcctcaatgatcttcttaacgatcgacagtcctatgccgcttccgcctttggatgaattcctggaagcgtcggtccggtagaaccggtcaaatatattcggcagatcttttgccgcgatgcctttgccgttgtcttccacctccacctggataaagtcacccacatccttgactctcagattgatcttccccttcgatttatccatatacttcagggaattgttgacaatgttgtgtatcacacgcttgatctgttccgcatctgcgataacctgtacacccgaggctacatagttaaagtatccgaactctacatttttagattccatctccagcgacagatcctccgcgcagtcattgaagtattcattcaccgacagcgtattgaaattatacgggatcctgtttgtatcgatcttggagtacagtgtcagctcattgatgagcagatccatctcattggctttattatatatcgttctgatatatttatccatcttttccggagtgtccgccactccgtccatgatcccttccgcataccctttgatggctgtcacaggcgtcttcaggtcatgggaaatgttgctgatgagttctttgctctctttgtcgtactttactttctcctccgcattgtccttcagccgctttctcatctcctccaggtcccggcagagccgtcccagttcatcgtctgccgccggtcttaattcaaagtccagattcccttctttaatattctgagccgcgcactgcatctttccgagcggctgcatcaccgcgcggtatatccagaatataagaagcagagctgtcagcacgagcaccataagtatgcccatcaccagatctacaatgaactcctgtacttccggtatcatattgctcacatcggtgacgataaacgcgcttccctgttctccgtccccgtacaggaaatcgacctgtttgacgagcgcctgcgcctccccgccgagatagactccattctccgacgtgttgcctgactccccgtaagcgggaagctgggggatcacatgattcacattgtcaatgtcggtccccatatatatgatcgtagtgcctttgcgcacaaggagatatgcttttttcttttccagctttttgttaaacttctccagacaggtggcatcctccagctgctctgactcttcctttgccatctcataaagctcatgataaggcttctccgtaaggcgcgagagtacctgcatggaattggcaaagctttttacggtcgttccggttatctcatatgtcttttctatggaattgatctgataccggctcaaaccgcataccataagatacgtaagcaggaccggaatcagtatcactgtcaaaaatgctattataagccttgtttttagcttcatagtaacgtcctccgtgcttaagtatagcatgaaaaagggtgcttcacacgaaagcacccataaacatttataaaatttttataaataccgggacaattctgccgctttgtcagtcttctcccacggcagctcgatatctgtccgtccaaaatgtccgtaagccgctgtctgtctgtagatcggccgcctgaggtccagcatcttgatgatccccgccgggcggaggtcaaaattctcccggatgatctccacgagcctgtcatcctccagctttcctgtgccgaacgtatcgaccatgacagaagtcggatgagccaccccgatggcgtaagacagctgtatctcgcatctttgtgccagccccgccgccacgatatttttggccgcgtaacgggccgcatatgctgccgaacggtccaccttcgtgcagtctttcccggagaatgcgcctcctccgtggcgcgccatgccgccgtatgtgtctacgatgatcttccggcccgtaagtccgctgtcaccgtggggaccgccgatcacaaaccggcctgtcggattgataaagaacttcgtctcctcatctgccattccggaagggataaccgcgtcaaatacgtattttttaatgtcctcgtgtatctgttcctgcgtcacatcaggatcatgctgggtggacagcacgaccgcgtccagccgcaccggagctcctttgtcatcgtactctaccgttacctgcgtctttccgtccggcctcagataagaaagcgtgccgtccttcctcacctctgtgagcttcctcgcaagcctgtgggccagcgcgatcggatacggcataagttccggcgtctcgtctgtcgcataaccgaacatcattccctggtcccccgctccgatggcctcgatctcagcgtcggacatccgattttcctttgcctccagcgccttatcgaccccgagcgcgatgtccggagactgctcgtcgatggcggtgatcacaccgcatgtctcacagtcaaagccgtattttcctctcgtgtatccgacttccctcactgtatccctcacgatcttctgaatgtccacatacgcgttcgtcgtgatctctcccatgacgagcacaagccctgtcgtggtgctcgtctcgcacgcgacgcggctcatcggatcctgctccatgagcgcatccaggatcgcatcggatatctggtcgcacatcttgtccggatgtccttccgtcaccgactctgatgtaaataatctcttttccatattttctcctttcttaacggccgtttaaagccctgcaaaactttctcccggtggtccctcacagtatgagaatccttttcttcataccgcagaaaacagcccgccataagcggactgttttatattcataaaccaatcctcttattgttcgaaagactcgctcaggttggcaccttcctttacggggttgccgcagcttcacagatcctttgtatctccactgctctgaataagagaaagtttcattattaactttgttgttcaataagactttactgcctttctgtgaaaaagtcaatatacaatcagcatttctgctgtattttgatccgtgccgtcactgccatgccaatgacacacactccccccgcggctataaaggacagatttgttccaagaggggtgctctgcaccgccgccagaaggtacgggcagagaatggacacaatgccatatccgagcatgaccgccccgaagttcatcccctgatacttcatgccgaaacaatcggacgtgagcaccggaaatacgctgacgaatcctccgtatgtaagtgacacgagtgagataagcagtataaacagccctcctttagcggcggtcaggccgacgaccgatatcatggcgataacatacagcacctgtatcaccgtcttccgtccgagaaagtccgacacccacggggccgcaaagcgtccggcaatgttggccgcggaagccgccatgacccccgcaagagccgcgctgtcggtcagccctctctccatgccgagcgatttcatgagcgggttgacgagcacatacgccggaactgccagcgccatggacacgctgacgagataatacgtctttgtgcaaaacatttcccgcgtcgtatactgcctctttcccagcgcctccgcctcctgtgctttttcatattctaccggctttggccccggctctgaaataaatataccgccaaggctcagcacggcatagaccgccgcggtcgtcatcatggcggcccggtacccgtacgcggagagaagccagtcgcagaatggattcattatcacacccgagattccgacgattcccactgttatcccggtcacgaggcctctcttatccgggaaccattcctggggcaccgccacgagcatgctgaacgcgcagcccgagccgagccctccgagcaccccataaccggcggatatgagccacggcatattgtacggggcggcggccgcgagaaagaacccggcgcacatcacaaagctgccgccgaggatcgtcgctcttgctcctatcttgtgctgaagatacccgcctatcatgttgcccacggcaaagatgccgatgatgagcgtgaacggctggctcgaagccgccaggctgagatcgtactcagacctgacatgaggctggaatacagtccatatatacggatttccatgtacaaaattaactacagccgcaacggcgagtataaaataacggttcgttccctttttcatctttttctccacttaccaaaatcagcccgcaatatgcggactgatcaaaatgtctgttttatacgattctgcctgcgcatctttccggatataaataccagaaacgcgcttaactcacttttaacgtaaatttctgtatttctttttctgtcgacacctgctccatgagcgctccgatactgcggagcttttcatcgaatctttcatatccgcgcagaatgtagatgatatcatctacgatcgtgattccgtcagtggcaagtccggcgatacaaagcgcagcgcctgcccgcaggtccggcgcgctcactctcgcccctgaaaactgctccacgccctcaatggtagcggaattgccttccacttttatattggcccccattctggccagttcatccagatatttgaatctattttcaaaaatactctccgttatggtacttgtccccttgcataaagccagcgtcaccccgatctgaggctgcatatctgtcggaaatcccggatacggcaatgtctttacgtgggtgcttgtcaggtctcctttggatacgacacgaaccgcgtcgtcaaactcttccacttcgcagccgatctcagtcagctttgcgatcgtcgcctccagatgcttcggaatgacattcagtaccgttacatcgccttttgtagctgccgcagcgaacataaacgtaccggcctcgatctggtccggaataacagagtattctgtgccgtgcagtctgtgtacgccccggatcttgatcacatccgtacctgcgcctcttatattggcccccatgctgttcaggaaattggctacgtctacaacgtgcggttcttttgcaacattttccatgatcgtgatgccttccgccatcgttgcggccatcatcacattgatcgtggcgcctacggtcacaacgtcaaaatagacatgtctcccgacgagcttctccgcctctgcgacgactttgccgtgctcaatatccacgtcggccccaagcgcacggaatcctttcaggtgctggtcgatcggtctgcttccgatgttacatccgcccggaagagccacttccgcccttttatactttccgagaagagctcccagaagataataagatgcacggatcttcttgatatagtcgtattccacatcatagtttctgattccgcttccgttgatcttgaccgtatgacggtcaacccggtgtactttcgcgccgattccggtaatggcgtccaataatacattaacatcattgacgtccggtatattgtcaataagaactgtgtcatctgtcataattgccgctgcaagaatagcaagagccgcattcttcgccccgcctatctctacttctccaacaagcggatggccgccttttataatatactgttccatactgcacctcaatatcgatttatattcactctcaaaactttgatagctatttttctttattcacattctttgctattataccatagaatcgaaaattgtaaaatattttttacaattatgtaacttatattacatttttcttaatgcaaccgtaactttttatgcactttgtaatgccccgatcaccttctctatcgtatcttccagcttcagtccgtcctcgcacacagttatatctgcatatttctcaaaaagagggactctctcatcatacaggtgcctgagtgtctgtccgtcccgaagtacaacgcctctgttttttgcgcttttcagtctcttgtttattgtctcataagatgcctttaaatatacgaccgtaccgatttctttataatgtttcatggcatttttgcagtacactacgctgccgccgggcgagatgaccgtattgtccgcctctacttcggcatttacgcggtcttccacttccaaaaatccgtcaattccctttttttctataatttccctgaggagcttcccttctttttcctgtatcaaaaggtccgtatcaataaactgatagccaagccgctttgcgacaacgaccccaactgtactttttcctaccgcaggcataccgataaatataatattttccatgtctgtcgtaccttcctcaatatgtttaatgattattttaacatataccggctcatccgtccaccctcacgaaacccaaaaggagtcaggcctttatttacaaggtctggctcctttctttcattagtagtatttccgtctcatatttctgtgctcgcagcgtctgcggcacagttcctggtatgccatgacctggatcaggtcgtggagccatttgcccggaacttcttcatcctcctctgccctgtcgtagatccgcctgcacatcagccgcagctgcagctgatccgggtattcgtcatacatcatgcttccttcgtattccagcctgtcgcattcatcctcaatataagggatcagccgcttcgccgctgcaggatacaggctcttcatataatccaggtcccttctggcaaccttgtcatcatcatagagtaaaggcatcggataggccatgtagtaaggcagtcgattgtccatgtacacacactcctaagataagtatctatcttatcatatgcggcgttctccgcgatgttccacaatcatgccatacatccctccaaacttgggccgtatcgccctttaccgctctgcgggatatgatttttataataaaataaagaatgtgccaaggcacattcttgcgccgagcgcggtcgcttgcgacatattacatcttcgcgcgagtgcgcctcccccggagggtttttataacatagggaacgaagtttcctatgttataaaaaagcaggcagcgcccaccttgcggtgccgcgctgcccgcgcctgaaagatcaggccttctcactgtaatgatgcgcttcttcaagcatcatgtcttttactttcatcagacgaatctgggagcttctctcgttctcgtccagcttcatcgttatatacttgatatttttctgtgcttccggaattataacatgttccagcgcgtttacacggcgtctcgtcttctcgatctcaaccgccatgagctggcatgctttttccgtctccgcaagtttcagcatatccggcagaatatccgccagagatttcactgcgccgtccaggtcgcttgaggtaaacgcaaagccgtatgaatatatatcatttgcgtcggcagtcctcgtcttcgtctcaaagaccgggatgttgacactcatgacatttttcttatcaacttccagatttacctcctgctttggagccatcagtgctgtattcagcgtagcttcgtccattccggccttggctatgacaaaattcttatttgcggagcggattccggcctctactttcagacgcagttccatattttctcggacaaggtccaggaactggcgcatcagttcgtcacgtttatccttcagaagcttatgccccttcacggctgtgactaattttttctttgtcttggtcaactccatacgggtaggagtcacctgcgtagatgccatctatccatccacctcccttttttactgttgatttatgccgtggagatttgcttggcgggtttgccggcatggggtcgccgtgccagtttgattccgtctcgctttatcttgctgcgggctggcgccctgcagcttcacttgcttgacggggtgctggcaagggtccgccgtgccagttcgattccgcttcgctccatctcactgcgggctgacgccctatgcagatttccagcaatagccttttgcaagcaagcttgcacggctattacttgaaatctgcgcacggcttactgctttccatagtattgatctaagaatttgtcgtcgattcgttttagctcggctcttggcagcatggataggagtttccagccgatctcgagtgtttcctcgatggagcggtctgtgccgtatccttgtgatacgtattctttctcgaatgcatcggcaaatttggcgtagagcaggtcgatgtcggtgagggccgcctctccgaggatggtcatcagctcttttgcgtctttaccgcgggcataggctgcaaataactggttcagtgtattggagtggtctcctcttgtctttccttcaccgatacctttatccttcagacgtgacagggaaggcagcacgtcgataggcggctggatgccctttctgtaaaggtcacggctcaggatgatctggccttctgtgatatatcccgtcaggtcagggatcggatgtgtcttatcgtcttcaggcatcgtaaggatcggtatcatcgtgatacttcccttcttgccgttctggcggcctgctctctcatagagggatgcaaggtccgtatacatgtaaccaggataaccacggcgtccgggtacctctttacgtgcggcggatacctcacggagcgcatccgcgtagtttgtaatatctgtcaggattacaagtacatgcatatccttttcaaatgccaggtattctgctgccgtcagcgccatacggggagtagagatacgctcgatggccgggtcgtttgccagattgacgaacagtaccgttctgtcgatagctccggtctctttaaatgattcaacgaagaagttggattcctcgaacgtaatacccattgcggcaaatacaacggcgaaattctcatccgttccgcgcacctttgcctgtcttgctatctgagctgccagattggcgtgaggcagaccggacgcggaaaagataggaagcttctgtccgcggacgagtgtgttcagaccgtcaatggccgaaacgcccgtctggatgaattcttccgggtaacttctggccgccgggttcataggcaggccgttgatatctctgcgctcctcaggcagaatctcaggtccgtcatcgatcggccgtcccagaccgtcgaatacacgtcccagcatgtccccggatacgccaagctccatgctccgtccaaggaaacgtactttactgttgcttaagttgataccggtcgcactttcaaagagctgtacaagcgcgtcgtttccgttgatctccagtaccttgcaccggcgtttctcaccgcttgcaagttcgatctcaccgagttcgtcataagctacattctcaacaccgcgcaccagcataagagggccggcaacttcctgtatggttctatattcttttggcatgatttagaagtcctccttcccaaacgaacctgcgatctcggtgtgcagttcatttactatcttttcatactctgtctcaatatcagcatccagcgtatatttgtaacgtccgatacgctctcttacccccatattgatgaggatctgcatggaagcgccctggcttaaggcctcggaagcctcctcataaaacgcaagaacgagcttcatcatcagatactgctttctcagagacgtatacgtatcgatatcatggaaagagttctggtgcaggaagtcctcacggatcgaccttgcagcctccatcttgaggcggtctgtcggagacagcgcatccatacctaccatcttaacgatctcatcaagctctgcctcttcctgcagaaggctcatcatcttctgacggtcctccatccagtctgccgcaacttcattgttaaaccagtctgccatattatccacatacagggaataacttgtcagccagtttatcgccgggaagtgacgcttgtaagcaagggcggagtcgagtccccagaacaccttgacgatacgcagcgttgcctgggataccggctcagagatatctccgcccggaggggataccgctccgataacggaaagggcgccttctctcttatcctgtccgagtgagatcacatgtccggctctttcatagaactgtgccagacggcttccgagatatgcagggtagccttcctcaccgggcatctcttccagacgtcccgacatctcacgaagggcctctgcccagcgggatgtggagtctgccatcagcgctacggaatatcccatgtcacggaaatactctgctatcgtgatacctgtgtagatagatgcctcacgggcagcaacaggcatatctgacgtattggcgatcagaacggttctctgcatcaatgactgtcccgtcttcgggtccttcagttccgggaattcattcagaacgtccgtcatctcatttccacgctcaccgcatccaatatatactacgatatcagcctccgcccattttgccagctggtgctggataactgtcttgccgctcccgaaaggtcccggaaccgcggcgacaccgccttttgcgatcgggaagaacgtgtcgacgacacgctgtcctgtcacgagaggtttctccggcggaagcttctttacgtacggacggcctttacgcaccggccatctctgcagcatcgtaagttctttatcgccgtcttctgtggcaatgactgccactgtctcttccactgtaaattccccttgtctgatctccttcacagtacctttgataccgtaaggaaccattatcttctgctggacaacgatagtctcctgcaccgtacctaatacatctccggcctcaacctcgtcccctgcttttgcaacaggaacaaattcccactttttatctctcttcaaagaggcaacctcaacacctctctgcagactgtttcctgaaactttcatgatatcgtcaagcggacgctggatcccatcgtaaatgcttgcgataagaccaggcccgagttccactgacataggaacttccatagattctaccggttcccccggtcccaggcctgacgtctcctcatatacctgaattgatgcctcgtccccgtgcatctcgatgatctctccgatcagccgctggttactaacacgtacaacgtcgaacatgttagcgtcccgcattccttccgcaataacgagcggtcctgctacttttttaatcgtacctgtactcatttggacgaatcacccacctttccttctttattcgttcccaaagataatatcagagcctactgcctgctctacagacttcttaacgccttccaccccggctccggtattgccggatatgcccgggatctgaatgaccgccggcacagcctgctcctgatatttctctatttcatgttttaattctgccgccagcgcctcagtgacatagatgatgccatagtccccaagtgtcagctgatgcagtttttctccggcttcctcgcgggtacttactggaaatgtatcaagacccaatgtagcgaaaccgtagatactgtcataatcgcccaatactgcaatcttatacatacatctcccttaccctttctcggattgaatcgtccggtaagtcattaagtttgccggaaagaatgattcgtaccgttttaatttcattctgtcttgcaattacataggcgataacaggtcctatcgtaaatgcattatatttctgtggacttattgtctgaataatacggttatcacaccagcgctcgaaagccgacggagaatccgccagcgcctccgcgccttctgcgtatgcagtgccggataaatattcccggatcgcatccatgccgctaagcgctgctttagccagctggtctacattgatgctcgcacattcagccatcgccctcttcataaattccaaagacttcgcggttttctgtgagcggacagcgatcttgatatcagcaactcctaccgtggactcggcatagtcgcggataatatcatcctctgcctgctgtcccgcttcatagactgcctcaagtgccgccctgtcgattattacgtcgcaaagctgaccatccctcgtgtgaagaagggtctcatacgcctcctccgccgctgcctgcatgttccggggaagctttccaaagtccttttcgcggacgatctccagcatcactttccccgggatcgcaacatcctcatagaaaatgtgtctgttttcttcctccgtacacacctctttaattgcagctttcaggttatggaaaagtttcggataagagagtacgtcaaacttatccatgtccacggacaattctttgactacttcccagatcttctcctcctcccggttcagtatcgcttccgcatctgccggggtatcgctgtctccccaccctttttcctgaaggaactgaatgcactggccgtaatccgcacaggcgatcagctggtcaacggtggaattggagaatagagaaacttccaaagcacgtatgcgcgcaaccgcgtaggtatattgttcactcatgttactcctccttatcgcttatggttacgcttcttataaaaataataatttatggacctgatctgacaattcatctttttttgcatcaaacattgcttttaatgtacagttctcctcgataccgccgtacgcaagaataaatccgttttcaatattcctgcccgtcttcgataatgtcagtctgcctcccttttcagcggcaataccattgatcttctgctcaaaaccgtcaggaagccgttcaaggtcagcggatgaaaaataaatctccccttcctgcggcagggcatatttgccgagcagtttcagcagcatgtcaaaatacgcgccgctttccattgtcttcagagttccgtaggccttatccagtacctctgcaataatctcctgctttgcagcaagaatcttcgtccttctctgcaggtcgatggcagaaacgattctgtctttataatttgcaacttccgcctctgatttttgggagatgctgctggttgtcttggccgcctctgctttcgccttatccagaatatcttctgcctggcttttggcttcggacagcttgctgtcagctgctgctttcgcttcatccagaatctgacttttcattttatctaatccagtcatctcgcacgctctccttttcttaatctttgtttcatgcctacttatacactgattgcagtaacagataagatagagatcaaaagtgcaagaatagcatatgtctcaaccattgcagggaaaagcatagctttaccgaactggtccggcttctttgcgatgatgccgatggccgccgctgacgtctttccctgatatttgccggatataaggccgacgataccgatcggaagacaagccgcaagaacgagaagacctgtcgtcactgagatgtccgccgcgcctccgccgagcaggccgatctttgacagtgtgataaagccgacgagcagaccgtagattccctgtgtaccaggaagcagctgcatgataagaactttcgcaaacttgctcgggtcttccgttacaactccggaagccgcctgccccgcaataccaactccgatcgctgaccctgcacctgcaagaaatacagccactgctgcaccaagtaacgcgtaaacaatacctaaatcattccaaatactcattataaagtttcctccttaatatctacatattttgtatctgaatggaatggctcgaaaggctttccgccaccctcataaaatttgctgaaaaattcaacaaactgtaaacggtttgtatggacatatgcacccagaaggttgatggccatattcaatgtgtgaccgataataaatacgatgataaacgcgatcacccctatgatcccgcttccgatcatggatgccatctggttgataacagaagcgataactcctgtcgcaagaccgagggcaagaagacgggagtaggaaagcacgtcgctcagccatccggttatattgtaaaggtcataagctccgagcgctattctgagcgccggatttttattggcacgccctgacatgaacagaaggccggcagcgccgataatggcaagtgctttggccagtgtatttaatgccggagggaaattgatctctgcctgtgctatggaagcgaatatatcgcttggaagcagcatcagaatgagaccgatcaaaaatacgtaccagagtatcacatcacagaaaaagtctaatacctttccgtccttgagatacatatatcctttgatgccaagtccgatgaacagatggatcataccgaacagcatagaataaatgagcagccgcatcgggtcgttcagcggaacaaaccagagttctttgatattgaccgcggttccgaagaacttctcggaaaataccggtatcacatctccgaaatatcctccgaagagaacaccccagaacagtgtggaaaaaccgcagaacataaacatttttattgatttgtgcattccttcgctcatgcgcgggtattttttgagcagcacgaaacatacgatggccatgatagcgccatatgccgcgtccgacagcatcagcccgaagaaaaacacatagaaaaatgacatgatcgtcgtcgggtcaaactcacctttgtggggaagcccgtaagatgccacgataccttccatgctggatgagaagctgttgttcttaagaacggtaggcgcttcttcgtcctcctttagatcttccacatcgatcacacagtcaaacttttctccgatggtcttctgcactgccggcacagcctcagcggtcgcgtaaccgctcatgacgaatgtcctctgtgactgcggaagtgttccgagcacctcgtacttctctgaccggatccggaagtaatctgagatcagtttcagctgttctctgctgtccgcgaagcccacgatctcagcttcctttttctcaattcttttattcagttttaatatctctgcctcaagttccgttttcagccgggccggcaccttgtccgtcacctgtgacggtctggcaaatccggccgtcctgagcgcctcttccaccaaagcttcctccgccttaaggcacagtacggtcagatatacggcgtccttgtcactggctatgatatgcacgtcaacagcctccagatccggattctgctccgcgatcctggcatatacgccgtccagtgttaaacctcccggcatcatacccacaagtacggccacgttctccgtgccctggtgatccatcggcacatccagtgtgagccatggcgtcagagactcgatctgattttccagcttcaggatgttcgccttgttctccgcgatctctttactgcagccgacgagcctgttggccgccgcaattatcttctccttgtcggcggcagctttgctgaacttttcctgttccacaagcttcttgccttcaaggcttgaaagcattgaactcttttccggagcgtagttatcaagtacggccagcgcctggtcggcgagctgggccttcttgtcaaagctttgtctggcattcagcgtatccatcctgccaaaagcttcatcgtcttccactacatgattgatctccatgactcccatggactggaccttctccaggatggctttacggtcttttttaagcgcgcagatacttattctttgcatctgcaatactgccatagccgcatccctcctttactattcattttcataatgctttaaacgagttctgctattacagcagatatcgcatctccttccttctgccttgcagcttctttcaaggaggcaatctccgtctctacctctgccagagccttctctgcctctgtttccccagcctctttcgcagcctgaagtgacgcttttgcctttgcttttgcttccgcttctgcctcttcttttatcctcccggcatccgcagaggccttctcaaggattgaagtacattctgtatcagcattcttaacaatctcttctgcctctctctccgtctccttgatggccttaatggtttcttctaccatcggttcaccacctctcttagttgaaactccctgtagttaaaattataatatgattccatagaaaagtccacaagtatattgtctactaacacctttccatgcctttcctctacacaattcaacgaataatctatcaattttacgttatctgaccttgacagctaccaagtcaggcggtggagatgcccttctttgttcatacctgcaaagccgttctgacgcagcgcttcatatagtattatcgcaactgaattgcccagattcagggaacggatatcgcctgccataggaattcgtatactgtcttctttatgttttaccaatatctcctccggtattcctgcactttccttcccgaacataatataacagtccggttcatagcggacatccgtgtatacgttcggcgcctttgttgtcgccatgtatatcctggccccctcgtttttctccagaaactcatcgaaatcgatatatgtggtcacgtccagctcgtcccagtaatccataccggcccgcctcagattcttctcgttcaacctgaacccgagcggttctatcagatggagccgcgcgtttgcagcaacacacgtccttccgatatttccggtgttggctggtatctccggctcgtgcaacacaatattcagcatttcccttcctcctcgtaagcggtttttaactacttccttttattttagtgaaaaaccgtctggcagtcaacatacacttttgttacttttgtattacaattttaccaaaatattggaattttttaacattttatatatatttgaatgtaaacaatgctgtcatataatacgaaagagagggaacttttattcacctctcttagtatgtcccaatattttatttaattcatccggagccggcctgtcaatgaaccggatctcttctccgttttgtatcaccttgtcattattgtccgtcatgcggccgatcaccgcagctttcatcccgcgtcccgtaagctcccggcccagttcacggccgttgtccgccaccatcagaaagcttcccgccgacatgagctgatacggattcagccggtagttttcacacacttctatcgtctcctgccggaccgggatcttcttcatatccacgctcagccctgtctccgcctccctggccagattccacagcgcggcaaaaataccgccctgcgtgacctggcagaagacagacactcccatctgtcttgcagccgggagttcttccccggcaaatatctcgcctgcgaactccttgatctgctttataaatgcaggcgcgaatctctcctcaagctcgtcttccttctcctgcaggatcctcaccataccgccaagccccgcccactttgtcagtacaatgtcctggccgggccttatgactctgtccgtatattctgccgttccggtacatgtgaccgacacaagcggcagcgcggcagccggtgttttatattgttccagaaagatgatctttacaccgcgggcgccgcacgctttttcgatctgtttctgcacggcggtaagccgcggtcttccgtaaccgtccggtatcatgatatggacccgggcttcagctgccccggctccggccgccgcaagttcattcagagattctgccagcgcatgcactcctatttcttttgactgaccgcatgcgaaagcggtcgcgctcaccgcccgctctccctgcagcttcgtactcatcattttatgtccgttcccttccactgtcaattttcctctcctgcgttgtcacttccggccgcgctcatcccctttgcctgcgccaccgcagcctcgatggccgccttgtcctgggaagcaatggctttgcgcacgagttccgccgcctccgcattatccgacatggtacctacttccacgatctgatccgacttttcataggtgctgttgttgatgacatcccggctcacctccgcgccgttctcgtacactaccttccagagcctggccgtcttcccggtatgcggactgcccgcatactgcatgctgcccagttctgcttccttattttccttataggtgaccccgtagtcttctgttgtcagtgtctcactttcatattccaccgtacgcccgtctgccctcgtatccttcccgtagatcgtaaagcgcatctgattcgcgctgtctatctcggctgcaataaaaatcggtgtatcatagctgttcttgaacctgagatccagataatcacccgctatcgccgcatctctcgacggatcgacatacgccacgagcatggagtgaggataacgttccagcacctccagttctgcatacagcaccgcattgtaaagcgttgtggacacctggcagataccgccgccgtaagaatccaccacctgtccattctcataggaaccggcctccacgtacccgtgctcggcatcgtaaggagccgtcgtatcgtggacagataattcctcccccggcatgagaatgctcccgttgatcctgtcgaccccggtcttcagatttttccagcgctcgccgcccccggcatctgtagaaaatgacccgagttcgtcttttatgctttcaaggtcacttgctttcacggacggttcttccgtcttaacggccatcttgaccttgaatcccttatggtcccacccgctgttcagatattttctgatcatctcggcggatgccttttcatcaacagtctcgcccttcttctcttttgtgatatcaaacccgtccgcactttttgttatgcctgcatctttcgcatgctccgccagaacttccactcgttcctctataactgcctttgtcttctccgcgtccaggacaaagccttcgttcaggacaaacttttctttttccagccccttgatctgccggtatctggtaaacagccggccctttttcccgtattcgactgccttatccacaacttttccgatatctttgtaggcaagccccagttcctcaagcgttgccccggctgacttgtctcccaccttcatcgttatctccagcgcggcatcttccttaagatgctgctccatcagctttttggcttcctttttagttcgtcctgagacgtttacatttcctatataaatattgccgcatattttgttctccggcacgtccgatacataccggtaaagcacaaaataagagatccctgtcagtacaaccgcacacagaacagcaaggccaaaaagaatcctcattcttctccgccttctctgtgtagttcttctgttaatttttttacgccgattctgagtcataagcctccccctgacttttcccctgttatgccatcagataagggatcgtcattgttgcgatcatcgcaatgacgatcaccatgatcacgatagcgatgatcctctttacccttctgtcgttaaaattcatatccattaccttctttgcttcatttgatttgttatattttatactctttacagtatttttgcaagaaacagtcccggcatttcggctttctggccgtgcataccgacctgccaaacgttatgatctgtatattgtaaagtatccaatggtctctcggcagttccttcataaggtcctgctctatcttctcaggatcattattctctgtcagaccgagccggtttgagatccgttttacatgggtgtccacgactacactcggttcatggtaaatattcccccggatgacattggctgtttttctgccgactccggcaagagagacgagttcttccagctcccgcggcacttcaccgccgaatctgtcccgtatctccttcatacatgcaataatattccgggccttcgtatggtagaaccccgtaggctttatgtcctgctccagctcctcaaggtctgcctgcgcaaacgcatccacggaagtgtactttttaaacagcccctccgtcacgatattgacacgggcgtccgtgcactgtgcactcagcatagtggcgatcaaaagctgccacggagagtcatgattgagataacatacaaaatcagtcccatactgctcgtccagtatctccaatatctcctttgtccttttcctcatctctgatctcccgtatatttttcatcagtattttatcacatgtctatcatacatgttctcgcctcctggttcaatggatttctttgcatataatcgaataataccgtctttccaaggcatgtaaatctttccagatgtgtcatcctgcgcagctggttcctgtcagacgccttataaccttccagatatttccgctccttctcctctttttcatagaattcccttatctgttcttttgtaagcatgtgatcacccgcaaactctggccttgtcttcgcgttttccctcagataataatcaaaaacaagcagttcccggtaatactcagtcttttcctcacagcaggagctgataaaggaaagaaggatctcatagcgggcgcttcgtctgtgctgtacattcatgtgatccttttcttcgtaaaatttccgcaggcggtcaaacatatcaaacggggaatcaaactcctctataagcctttcaagtgtcctcgtgtactgtccgctgttatagtagacctccaccatctcctcgattcctttcaggcgcagaacgtctccgtaagaaagccatttcgtacgcaggacttcgtaacagggcgaactcttatgcacgagtccgtaagcctccttttgctgttccatataagaacctttcaatactttgagaaagccgagctgaagctgatccgggcgcagggcatatacatcatcgaacgaccgtttaaaactttccatatcttcataaggaagcccggcgatcagatcaaggtgctgatggatattgccgttatcccggatgcgccggacggtatgcgccgccttctcaaaatccatcgtccgcctgatctcctttaccgtgcacgggttcgtggactggattcctatctccagctgtataagccctggccgcatcttcccgaacaggtcaagctcttcctcgttcagcaggtcggcggcgatctcaaaatgaaaatttgtgatcccattgtcatgctctgaaatgtacgtccatatctccatggcatgtctgtggttgcagttaaatgtcctgtccacaaatttcacctgcggcacgcgcgcatctataaaaaactgaagttcccgcttcacaagagccgtgtcccggaatctcagcctcttgtctaccgatgacagacaatagctgcacgagaacgggcatcctctgctcgactcataatacacgatcttatgccggaacagttccatgtccttgtatacaaacggaacagcgctcaagtcaagcacatcccgccacggattctctgcaattcctccgccgctgtctctgtatgtgatccctttcaacgaagacaaactgtccggcacgccctgcgcccctgcgccgcagtaaatacggcagagctgcgcgaatgtctcctcaccctcgcctttcatgaccccgcacactcccggaagcctctccagcacctttaccgcgtcgtaagacacttccggtcctccaagccagatatgcgtctgcggaagtaccttcttcagttccgtgaccagttcctccacgaacgctatgttccatatatagcaggaaaagcagatgacatccggctttcttctgtacaagtccataagcagttcgtccggctgctggttgatcgtatattccgcggtgtccgtcgaaagcggaaggcttccttcccgcggtacgcaataagactgtgcatatgctttcaggctatgcacagccagattagaatgtatatactttgcgttaattgccgtcagtaatattttcatcttctttttcccgcctttttcctttccagactcccagtatgataagaaggatgcctgtaacagccaggctggacagggccataatgtcccacagcccggcatggacgccgcgcccgccggaagttcccggttccggtgtcccttccggatcttgttccataagttccagttctctgagcaccgcgtctgcgataagctgctgtccatcctctgtcggatgcagcccgtccttttgtatatgactgctgatccccgcttcctccaggccgacaacgcggtacccatattctgcggcgtgatctcttatgatactgttcatttttccgataatactgtccaccaccatgtcaagtgtgcccggcatcccgaggccggccgtcgggttatagatatctgtgacgaccatcctgaccgacggcttcgcctccccggtgattccatccatcatcgtacagtaattttcttcaaacgcgtcataatcccagtccgcgatcactgcgaccgccttgagcacgagcatagggtgcgccttcatctctgcatgcagcatttccaccgcatcgctcatattccagaaacgctcttctctgccgagcacatcctgacaagctgtcttaaacgcgtcgatcaagtcattggcccctatcgtaactgtgatgatatccgcggtccttatgcactctgacacatcctgctccccgagctttgacgcgttgaaccgcgccgtacttaacccgttttttgcaatattggtcaattctaccggtattcccttcttccgtgcatattgtctcctgacaagctccggatatggggagatctctttgtcatcgcacgaatatccgttggcgatactgtctccgaccgccagataccaaagtttctgcggctgcgccgcacggacctctccttcgcagcagacggatacgaatacagttatcataacagagaccgtgatctttgtgaatatatctctcagccgtaacatactcctcacctcataatgattataacatatctgccctctcccccggcagctattttcaaaaatccggcagtttttcgcgttcctgattgacattttttccaaaacacgctataatataggctcgtgcagccggggtgtcagcggtaccttgtacctgcaatccgctatagcaggggtcatgctgcgcagagggcaaagatttgtaaagctgcccttgacaagtggcgctgaggcttgggtcttacgcgacggaaatctgtgaatcgtgtcaggtcgggaacgaagcagcactaagcagaatcttccgggtgccgtgagggtgcctgggctgagttaactgtcaaggtaacgtttatggatttcgttcgaagcgcagcgcacgaaaaaaagaaatacacaactgtttttgcttttgcgcaaagacagttttttattgtattaaacaaaatcacctgccggagatcatcggcaaaatccagctctatcccgtattcctgccattcccgccgcacagtttcgtactcgtctggactatatccaatccccaacacaagacgcctcatgggcgtatccccttttccatcagtttagataaacaaagcgccgccaacctttttgaagaggatggcggcgcccggcatagcaatgttctttcgctaacttgaccagtctgcctgtaccttaccagcagacacttttccccgcttacccatgccgctttgtatagcggcgtttccgatagagcagcagggaggcaccgctcaggaggaccgccggcattgccagaagccagggcagcgggtccgccctgtcgcccgtctgcgggatagtggaatcgttgatagtcatattgcttgtatgaggcacaccgtccaccggttctaccgttacccccaacggcaaaaagccggtattggtgttatttttgtaccggataccgcctgtcccgctctccaaggcccattgtactgctgcggtaccgggggtggggctaaggtcagtattggtgccggccttgtacggggcgttgtcgcccgtctgcaaaataatcagtccatcgccggtggggccggggaaggtgaggccggcgtcttcatacaccaccgctttgccccggctgtacaccgtgccctttgcccttatctgcaccttgtccgtatcgctgcccttgctggttatagcagtgccgcctgcgtccgtctgcatcaccgcgccgcctgacaccgtgaaggtgaggccggtgctatccacatagacggtatcgccgccccgcgcggccacaaggcccccctgtatctccacgttctgtgtgacagcggactcaacatacaccgcccagccattgttaccggccgtgttgccggtgatgctgccgctatccatgttgaagatgccgtccgagatatgcactccgccgccgttttgagcctcgttgccctcattgctgccgctgccgccaatttgggccgtgccactcatgctcatcgtggcgccaccgtccaggtacaccccgccgccgttgtcgccggccccattgccaaggatgctgccgccctgcatgtccagtttactgtctctatcccacacgcacaccccgccgccctttggcgcttcattgccctcatcgatgccgctgccgccaatttgagctgtgccgctcatggtgaaggtggcacctctatccacgaataccccgccgccattgtaggtggctgtgtttccaaggatgccaccgccctgcatgtccagtttacagtttctccccaccataaacaccccgccgccctcgtcggcctcattgccaaggatgccgccgcccgtcatattgaacgtgccgcccaggtacaccccgccgccgtctgaggccgtgttggcctcgccggctgcactgccgccaatttgggccgtgccgctcatggtcatttgggcgccgcccgacacatacaccccgccgccattggtggagacattattgccggtgatgctgccgcctgtcatcgtaaatgcgccgttgtccaccacagacaccccgccgccctcatttgccatgttgccgctgatgtcgccaccttccatgttgaaggtggcgtcgctccccacaaacaccccgccggcagtgagggagataccattgccggtgatgctgccgccgtccatgatgaaggcgctctccatcacatacaccccggagcctctgttggaacggttgccggcgccgctgccgccaatttgggccgtaccgctcattgtcatttgggcgccgccctccaccgctatcccgccgccgttttgagcctcgttgcccaggatgccgccgcccgtcatgtccagccggcttccggcacccgtcaggtacactcctccgccgtcgccgttgacggcagtcttgttgccccggcccgcgacgccgattcgggcgttgccgctcattgtcatttgggcgccgcctgccacatacacccccccgccgtggccgtcggagagcgtgccggtggtcctgttggcggtgatgtggccgccctccatgtggaaggtggcagtgctgcccgtcaggtacaccccggcgccctcgtcggccgtgttggcggagatgaagctgccgttccgcatggtgagggtgccgccggccacgtacgccccgccgccggtgctgttgtccagcgaggccccatcgtccagcgtcaggctgccgccgtttgccaccgttaccagacggtccgcattggctgcattcttgccgtccagttgcacttcttgcagggtcagggcgccgccgtcccgcacgtcaaacataacgcccgtatacgatattcgtataattacggcagttccgctcccatcgccgtggatggtcaccggatagtccactacaagagaccccattgcgtcaaagatgtccctccctttgatctcaatatccgccgctcggtcgttcagcgcgtttttcagcttgttccagttatccaccgtgacggtacccgcccggggcgccagcgccagggcgtttttcgccccggtcagcgtcacctttatggtgggcggctccacatccggatcaaggccgctgcccgccggcagggcggacaggtccagcgtgggcgcaaaggtgtacacacccgccacatccgggtcaaagggggtgttgctggcccagccgctcacggtcacgggcaaagggacaccgtccgcgccggtggcttccagcgcgccgggcagcgccagatcgtcctgcgaggcaagttctcccgcctcataactttgctttgccacctccggcgcaagggccgcaaacccggtgatggtgacgccgggggtggactgtgcgctctccggtgtcttaccgctctcgccgccgctgccggacgcggaagcggcgggcgttgtactggtcaccgcgctatccggcgccacggacacgtccgtaccggccgacgccaacgccggcaccggccggccaaaggccacaaggcacaggcacagtgccagcgccagaagccgttttttatctcgttttttcatggggtctcctccttttgatgttctttccatttcagccgtcaaagggttttacgagcctactgagtaggctcgtgaagaggggtacccctcttcaaaatatccatccttatggttaaacgattcgtttctaaatataaaaataccatgaaaggaagaaaaaaagcaagtacaaccaaaattatcaacttttaaatgtagtgaattgcaaaaaggacggctgcgcgccacgcggacgctgaaagaacggtggggacaataatacctgacaggcacgtaaaagctccatatgacgaaccttcatcacatggagcttttcgtttttttattcacttggcataagtccgttttttcttcatacttttttatggctcaatgccaatggctacagattcttttttttcttcttcgcttctctgagctctctaaaaaatgacttcatcatggagctgcattctcccccgcacacgcctgtcgtcagttccgtctgatgattaaagccctccgtctgcagtacattcaggacagagcccgcgcagccggcttttgggttcatgcagccgactacgaccctgtccatcctggactggacgatcgctccggcacacatggggcacggctccagcgtcacatacagcgtgcacccttccagtctccagtcaccaatcttcctgctcgcctttcttatcgcagtgatctccgcgtgggccagtgtattcttatctgtattcctccggttgtatccgcgtccgatgatcctgccttcatatactataacacagccgataggcgtctcattcagggcatatgcctttcccgcctgctttatcgcctctttcataaacttttcatctacgctgttcacccgggtctcccccttcctcttttttgtacgtcctgtctatcgtcttatatggcggcaccagtaaccaaagtcctccccgtcatttctttcctcttcttccagatctacatctattttttctgcttttataaactgcggaaaaccgaaagcttccgcagctttcgcctctttcggatgatatatgcccggcacgccgagccacatgtttccgtcctcttctatgagaacaaggtggtgatagttgtaatatccgtgcaggagaaagctgttattggacagtctccattcgcagcggggcagattcactatatcctggcgctggatctttgtacattttttttcctgctcccggcagaccggctttggcctgacaggctgcgcctgcctgcacggaccgcacgccgtccggcttcgacactctgcttcttctatctccgcctcttccactgtctccacctgttcagttctgacggattcttcctcagtctctgattcttcatactctgattcttcacactctgattcttcacactctgattcctcagcaccggcgtattctgcgttttcttcctcttcagaggcttccatctgtgcagggatctcttcctccgggggaaagttttcactctcttcttccgcctcattccctgcgggcatttcttcttccgcctcttcccgctgtggcgcaggttcagacatccgcccctctgccggttcctctgtctccgggcgttcttccacgcgctcttcctccccgcttccctccgtcagatccgcaggcgtccaaaggcgcatctcatttacatttacaggcatgtcgtcccacaccgccgcatacttccggtgagagctgttttccattatgatcccctcgatccggtcataattacccggctcccctacatcttccttcgtatacctcagctggtagttcaccgcagggttcacattttccaccgtcccctgcggcagcccgatacattccttctctttttcgtaaaagagatatatggtcagctccttctctccttcaagccggagaccttttccgtgtatatgtacgatgcattcgccgtcgctttggtccactttcacgaaaccaacgttccgcattcttcttccattctcgtattcatacagatagcgtataaaacgtttcaacatttcacttccattctaagtccatttatcacaatctattccgaatggaagcaaaacatgttaaataatcgctttcagttcctgataaagtctcttggcatagctgtccgtcatgccgcatatataatctgtcacaagcagcaggcgaagatacagcctctcgatatccggcttcccctctgcatgatagtggtacgcgttcttataattgctcgagatgaatgataccatacgcaggtctatggagctgagcttctctcccgggtcatcgtaatgaatgacagccgtcacgaacttgtccataagaaaatcgatcatggctgcctccgccacttccatcctgtagatcatctcggaagtaaacacctttctgaatgccatatcgcccagaaggtccatgagcttttcagcaaatgtctgatggaacaggtcatatgcatacgtaccttccatgatcgcctcataatgggaagtaaagccgtaagttgcgcagctgataagaaagccctgtacacgcacgatccagtttttgatcgcatattcttccgggtcattcacatgcttttcttttcccctgcggtacagatcttccagtttttcagccggacggaaagcagactgggcccctcctgcgtactgctcctgcagttcttttaattcctccagaagactgtagtatgtgataaatcctttgataaacgcatcctcaatgtccgcggttttgtacgcaatatcatccgccgcctccagaatgaacgtgagcggatgtctcagcccgttcgttccggtctgcgccgctatctcctcaaatatatcttcatcggcaaaataatatcccatcttcttgtccttgatatttccggactgtttatcgatgccgacagaggcgaccggatatttcacaatggtgttgagaagcgcgtatgtcaggttcatcccctgttcatccacaagaaaatgtagcttcgtcacaagacgaagcgcctgggcattcccttcaaagttgtagaaatcctgccgcatctgcggcgtcagtaccttatccaccggctgcccgtgataggaaagcaccggcagattccgctcaaaccactcccgtatcgccgtctctccaaagtggccgaagggaggattgccaatgtcatggatcagtcccgcgcactggagaatgctgcagatatcttctttcatcccgggcgtaaaccccgagtctttcctgtatacgagaatattctccccaatgttctgtccaagcgattttgcaagagatgacacttcgagtgaatgcgtgagccgggtacggataaaatcacttttatccagcggaaatacctgtgtcttatcctgcagcctccgaaacgaagcgctcccgataatacggtggtaatccttctcaaactcacttctcaagtccgtagacttcgtatatttatttttattggaagctccgcggcttctcttcgttgacagcaattgttcccagttcaccgtttctcacacgtccctttccgtctgttccccgtcagtcaaggtagatcggcggttcataatccttgccgagcagcgcttttttacgctcctggtaaccgaggaatgcccattccgtcatatctgtccatgcatgctcctcccggtcgtacacttgtacatacccgatccggtttggatgcatgcgcacgctgttcgtctcatactcatgcccggtgtacggattgacgtcgccgttaacgcggtcctcgtcatcatagtcaacctcgggctgcgcgtacatctcatctggttcctctgctccgccgtagtccacgtaaggagcgtccggttcttccgcctgctccggctcctccatctgctctggttccgtcccggcggtatcctctgcgtactcctgtgacgactctgcatagacttctctcataccgtggatatcttcttcactttcaggctctgtctgcccggcattgtgttccggcttcttcctccgtctctgcagatatgacatccagccatgtgctctcttttcttcttccggcccggacattctgtctttttcttccccgctgtcccgttctctctcctcggcttccagggcagcgacttcttccagcagttcctccaccggcgtctccagaggcggaagttcacccgtctcctcctcgatcagggcatccagttcttcatggatctccacaagctcgccgatggtgatgtcccgctcaggcgccgtctgccggtcttccttttcttcgtccttctcctctgccaccggagcggaagtcactttcttttcttcttttttatagttagaggtcttttcctgactgtcgttatcttcaaggatgctcagtgtaaacggacactccagtatctccgcgatcatgcgcatgtcctgctcctgaaagttatcacgccccagccgctgagtcagattctgccgtgacatcttcttgccggtacgctcttcaattgtctctgcgagttccttgatcgtcattcccctgcgacttaagattattttgacttgctccccaaatgttagatccagcatgacttgtcctccttattaaattaataaaaatatactcacccaataggttttatcatttgtaagtaaacttatatatttcttcataaacctatacttttccctttttttattctaacaaattggtgaaaacacgtcaaccgtatgatgttacaaacaatgcgggaaacataccgccgcttttttaactcattcttttatgaccagcttttcattacatttttttatgatattctcatctatttttagcacttccctgtcatacgtatagattccgtttacttcctcctctacgtctgaaagctgtgtgtatacagacgccgacagtccccggtctatctgcgcggccacttcccggcccataagcgaggcgtaccccctgcccagttctttcctgctgccatagatgcggtacccgtatatccccggacacatactgtgccctttcactttcaggcagtatccgccaaattctgtaagggcggccactctcttttcgggacgcactttcagagggaagaaataattatgtatgctccaaagatcaccgcctccctgatcaaaccatccgctggcggaatccagaagccgggaggcatcctccctgcgggcagcctccgtaaccgcgttggcgtcaaactgtccccacccctcgttaaaaatgacccagacgacgatggacggatgattgtaaagcgcccggaccgtctccttcatctcctgcatgaaccttgccctgctctttacatcccgccttccgagcaggcggtaataccggtccgacggccttatatgaaaaagctccatggcagtggccgcataagtgacgtaccagtgtctgtaaggcgctcccccgcacaccatatcctgccatacgagcatgccaagacggtcgcagtggtagtaccacctttcaggttctatcttcatatgctttcgcagcatgttaaatccgagccgcttcatctccatgatgtcaaatatcatagcttcatcggacggggccgtgtaaagaccgtccggccaatagccctggtccagcactcccttctggaaataagggcggttatttaaaaacaggcgggggatccccctcttgtccctctctgccgatattttacgcatggcaaaataactttccacttcatcctcccccatacggatgtgaagccggtacagaaacggatcctcgggactccagctgtgtatctcctctagcgggatacgcaccgggcggttcgtgcatccttctgccccggcggcctgcgtctccccggaacagacagtgaaaacaacccctctctccctgcgggagcggacaaggacttccacctcaccctcgtcgtagcgcggcgtgatctttatcccgtatatgtgatcgtccggcacctgctccatccacaccgtctgccagatgccgctctgtgccgtataaaacatgccgccccgctccagcttctgtttaccccttgccagaaagacgcggtcgctgtgatcctgtatccggacggtgagctcattctccgcgccgccaagcagatctgtcacatctgcggaaaacggaatatatccgcccacatgtctgactgccggccttccgttgaccatgaccgccgcacactgatccgcggcgccgatgtgcaggatccaccttttgccctgctctttctttacctcatccggcagcttcctgccgtaccacagatattccccaggtctcagctgacgccccacgccggaaagcacagcctcaggtgaaaaggggacaagtatctccccttcaaaagtatccggcctttttctgctgtcagaaaaagcatagttccatatcccgttcagattcacataactttttcttctcagagacggcctcggatactctttcagcacatgatctttctctaatttatccgcccatcttgtcttcagctgtttcatccgcactccctctctcccgctgtctgcgctctgcactttaaataatatggttaaaatctacgaccttcgcctctttggcagtcacttctgctgttgtgcacaccgccatctttgcgccgatcccttctatattatactctgtgtaccggtacttttccaaaaaagcggccggctgtctcaaaagcaccggtctgttctgttcgtcaaagccgatctcaaactcatccataccaagcttcatcccctgccttgtcgccttcataaagctttctttgagcacccagaaacgaaagaacaggtccgctctcttctgtccgtcttcctcctccatcagtctctcatattcactttctgtaaaaaagcggcgtgccacacccatttttgcatcttttaccgtctcaatgtcacatccggcccgcactgcctccgccgtatcgctcagggcacacatgacgtaactgcctgaatgtgacagattgtagacgtgcgatccaccggcccccgtctcttttctggccgcttccaggagcagccacgcccctatgctctgagctctgccttcggcagatctcatccgctgcgccttcctcctgcgccagtccggtacaagcccgcagcactgttcatatgtgtcccgctcaagcagcggtgtgatatcagcgagatatgttctgatcatctgttttcagcctctctttataaatcatatattttgtataagtccaatatgctgccgtatatcgtctttctgcccgaaagctctttgtactccgccgaattgtctcttccgtctcccttgaggatctccagccgctttaagatctggtcgtattctgtcctcaccgcctgatacatcgtctcaaatgcttccagttttttctctttctccctgtccataatatacctcctgactcctctgtttaagccaattgtaccacacttctaagttgaaaattaaaatatttgaaaaagatattgacatcttaatatttatgcgatagtattaatcatgatttcacactttaaacaactaaaattttacagtgcgaatatatcagtacatatacaggcgatgttaaagcattatttatagaaaccggaggacctattatgattatcgtattaaaaccaaacacaaaacaggaagatgtatcccgcgtagagcacctcgtcaagcgcagaggacttgatacccacattgtagtcggacaggagatgaccattatcggctgtatcggcgatacgacaaagatagacgccaaactgtttgaagtagatgcctctgtcgataaagtcatgcacgttcaggagccctacaagctcgcaaaccgcgcgttccacccggaagattctgttgtggacgtatcgggcgtgaaggtcggcagaggacacctcgctctgatcgcgggcccgtgctccgtagagtcggcgcagcaggtgctggagatcgccgccgcggcgaagcagtccggcgccaatctcttaagaggcggagcgttcaagccgagaacaagtccttattccttccagggcatggggcttgacgggctcaagatcctctgcgaggcaaaagaggccaccggccttccgatcgtgacggagcttatgtctccggagtatctcgatatctttaatgaaaaagtagacctgatccagatcggcgcccgcaatatgcagaactttgatctgctgaagcagctcgggcagctggaccgtccgatcctcttaaagcgcggtctgaacgcaacctatgaagaatggatcatgtccgcggagtatatcatggcgtccggcaatgaaaatgtcattctctgtgagcggggtatccgcacattcgagacgtatacgcgcaacacccttgacctgcagagcattccggtgctccgtaagctcacccaccttcctgtcgtcgtagacccaagtcacgcaggcggaaaatggtggcttgtagagccgatggccaaggcggccatcgcggccggggcggacggattgatggtggaagtgcacaacgatcccgagtccgcgctctgtgacggagcgcagtcgctgaaaccgcagaagtacgacgaacttttaagagaagtcacacagatcgccaaagtgatcggcaaaaaaatataagatacagattctggagttattatgaagttaaatgtaaatcttggggataaaagttatcctatatatatagaaaacaaaatactggacagcgcttccgactacatagtggatgccttctccggaaaaaagatcatgatcttttcagacgataatgtatatcctctgtacggggaggcattgaaacgctccttatccggccgctttgagtgccatgaattcatactgccccacggcgaagcgaccaaggcattcaaaacacttcccgctgtctattcggcactgcttgacgccaggcttacgagaagcgatcttatcatcgccctcggcggcggagtgatcggagatctcgccggatttgcggcagcgacttacatgagaggtgtgaacctcatacagattccgacttctctgctggcccaggtagattcctccgtcggcggaaaggtggcggtagacctgccccagggaaagaatcttgtgggcgctttttatcagccttgtcttgtccttatcgacccgctcgtgctgaataccctgagcccacgatttatcaaagatggcatgggagaggtcatcaaatatggctgcatccgtgatgcggacctgtttcgtaccttggagtcacacagttcctttgaagacttaaaagaagaactgcctgccatcatttacagctgtgtagatatcaaacgaaaagtcgtggagcatgaccagtttgataccggagaacgtatgcttttaaactttggccacacactggcacatacgatagaacagtatcaccattacgagagggagagccacggggaagccgtcgcggtcggtatgtaccagatcaccaggctggcacaagagcaatgcctgacagcccccggaaatgccgacagaatactgaaacttctgaaacagtacggtcttccttatgagtgcggcattcccctcagcgagctcaccgatacgatcgagctggataagaagaatctgaacgaccgccttaacgttgttcttctccgcgagatcggaaacagttatatacatcctgcaaccatagacttttttaaacgtaacctgcggaccatttaatatatttggaggaaaacaatatgagattagaaggaaaaattgcaatagtgacaggagccggaaaaggaatcggaagagacgccgcacttgccatcgccgcggaaggcgcaactgtagtggctgttgcgaggacactggcggatctggaagagaccgtgagacttatcgaagaaaagggcggaaaggccatcgccctctcccgtgacctgacgataggcgaacaggtccagtctatggcagacactgtcgtagaaaagttcggccggatagatattcttgtcaacaatgcaggaggatacccgaaggagatatacaacaatattgaacaccaggcgatcaaaatatgggaatggtccgaagaacaatgggatcagatcatcaaaacaaatctgcgcatcccgttcctctgtatcaataaagtcgttcctgttatgataaagcagcgcagcggagatatcgtcagcgtttcctcccgcatgggacgtatcgcttcccagatgggcgcatacgcagtcgccaaaggcgggatcatcactatgacaaagacgaccgcgatccagacgcaggaatacggcataagggccaacgccgtctcccccggtatcgtagacacaccgggacagagggtatacaatcactccgtcggtcaggacgatgccaaaatgggacgttccgaagatgtggcaaaggcgatcgtctacctgctctgcgacgcgcctgcagtcatgacgggccagtctgtagatttgttcacaacagtgtaaacgaaatgaaaaaaacatgggggacggaaaatttccgtccccttacttcataaatgttctgcctaaataatccaaatgtccggcaattttatgatatctccgttactcgtacggtattccttctccggccacaggcctgtcatggacaagatttcctgtctgcccccggtattcatcacaagctccgcggactttgcgccgctgacggtcacataccactcgtaagcctgcccgggcatcatgcgtctcccggtgttgtacaaaaccgaagcgtctgagagcatatatccgaccggcgcgccgtggccgtgtctcatccattcctgcccgtagccgagctggcggtatgatctctcctgcatctgaaagatctcaccaaacggtatgccctccctgctcatgctgattatctcggcctggatctggcacactgcatcgtatttttcccgtacttcttccggcacacttccaaaacagaccatgcgggcaatgttggaatgcagaccgtacctgcgcaatacaggcgacagcagcacggtatgctccgccgctttttccgtcggggtgcagtgtctgtacttttcgatcctctcatcggcccccacaagaagaacgtccgtctccactcccctgtccgcgcactgacgcagaagctctgcctttatttcctgttccgtcatcccacgctttatatttccggccgtatcggcgaggattctgtcagacagccttccaagctcccggtaccgttctatctcggtctctgtcatcggatactccagctcatataccgcctccgtgtcgcagagacagcctccaagcggtatgtccgacaacgctttctttccttttaaaagacgctcaatgtactgttcttttcccggctgtttccagttcagagtgtggaccgtaaatccaagtcctgccagcagttcctcttttgcttttgcggcgtccgcccaaagcgccgccgcagtcagttccttcctcgtcacaacaagatagacaaagccggtctcctgattcagtatgacaccgctttcctctcccccggtcagccaggcaaaattatctcttctggcgatcacaagcgcatctgcctgccgccggtcaaggagctgccggatcctttccagctttatttcaaagtcagtcatttgcgcgcctcttctcctttgtggtaatatacttcggctcccatatatttcccgagcgcttctgcaagtaccttggcggaatttccgcggttcatagctacatgatgttcaaaaccactgctgcagatatgatccatcagcgcctgaagccccggtactttgcagactgccacgcctccgggcgtatctatttcttcctccacaaagctgccctctcctacatacattttcacctttcctttttcctcatctgtggaaatctttccatacgtcatggttcccggagcgatcacagctttgcatgccccaaagcagttttcttttccaagactgttgccgagtatatcgagactgccgatctcaaacgggccgctgataaatgattttggaaagtttgaacagtgtatgccgatacacatatctctgtcctccccgaagctgttattccagtccagatatccgcagggcgacccgctggcaaggtacatggcgtacattgttaccgctcccgtcacatcagcttcacatgccatgggcattccttcttccccaagcatgctcatcgtcagacatgcggcacacccgtaattgatctgcagagagtcccagcactggatcgtccctgtctgacaatcgttttccttcatccagttctttaccgtcacatagagcttcgcctgctttactatatgttcttcttcaacactgtcctcaagccgcccgtaagacttgatcctggccgcggcctctgccacttcccccgtcatctcaagacgctttgccgcaaagattatttctgacatatctacaggtacgacctgtatccccatcttctgaagcagcttttccgaataccgtaccgtctggaaagccgcgggccgcgtgcccatctgagccacgcgaagcccctttaagcccgctgtaatgcggcacacctttgcaaagtctctgatatcttctgtaaatatatcgctgcctatggcgcatgtgtggaaagtcgtattcgtaaacttgatgccgtactgattcaggttactgcagaccgatatcttaccgcagaaagcatcccggcggccggcaatatccattttgtccttttcatcgtcgcacgcctgaacgagcaccgggacgttaagccctgctttgtctatggcgcttacgacgcccacctcatctccgaagttcggaaggcatacgatgatcccttgtatcctgtccgcgttttctttaaataagtctgcacacttccctgcatcgtccatcgtctctaccagtccgtatctcgtatcggactcatcgaggcagacggtgtcatatcccatgcttttcagcttttcaagtatttcgacccttccttcatgggccagctccgggttgaaaaaccctctcgttgatacgatcacgccaaatcctgtatgtaatcttttcatcttcatctacacctgctttcttaattcttttaagtctttaaaatcttccttcacatgccggtaaaggtttctgtatattttgaaatatttcatgtacgtctcgtggttctcctcgatcggttccataggttctacgtactctgccttctcttttgcaatgctgaagtccttcatgcagcccgtcgccactgctgccagcagcgcgtctccgtacggcgcccccacccggttctttacaaatacagtgggcacgttgagtacgtccgtgatgattcttctccagagtctgctctttgctccgccttcgttcatgacgagcggatagttgatcttaattccgctttccttcaatataataaaggaatcatacagggcgtacgcgactccttccatcatcgccctgacaaggtgtgcttttgtgtggtacagagacagcccgaacactactcctcttgcgtcattgtcccatataggagtacgctcccccatcagataaggcagtacgaccagcccctcgctccccggcgggatcttgtccgcctccatattcaggtaatcatagctgtcaaagtccggtatcagctcctccatcgcagtctcaagcttggcaaagttttccttcatatatctgaggcactggcctccggtctgggtcgttgtcactgtaatgtaagtatttgtgcagtccgtcgtatactggagattaaacatatcccggaacttttcttttgtgttccttacaatacccatgttgccgcacgtaccgaggttcatctgtatatcgcccacctcggtcgcccccgctccgatccatccggcattacagtcgacctgcccgcctgcgacttcgatccccggcacaagtccggtctcttttgcagcctcccctgtcacctctccgacgatatcctcacagcggaagaattccggaagtacagaggcttctatcccaagacgtctaagcattccctcgtcaaacctgttgttgtcaaggtcataggccaccccgtaaaatacgcctgcgctgtggtgcgcggtcatccggcctgtcagtttcatccggatatatccgtctatggtcagcgctttgtatatacgtttgtaatcttccggccggttttccttctcccataaaagattcacaagtatcggatggtcttctatacggtttccggtaagccggaatatctcgtctgccccgatgtgttcttttaaccactgttcctgccggtccgcccgccggtccatcagattgtacgcattgtgcaccggctccccctctttatctaccaatactagagaaggcagcgcagaagacgtgccgatgcctctgatatcctcaggctttacgtctgccttactcatgcattcctttatcatactgcacgtggcaggccagtaatcgtgtacgtcatgttccgaataattgtcctgatttgtgataatgtcatacttccggtaggcataggcaagcacatctgctttttcattgatgatgcacactttacaccctccggttccatagtccagtcccataaaataactattcataccgcacctccgcaacgctgtccgcatcctcgccttttatgaggcggtttaccttatccatctgccggctgtccagataacgggtcgtgccaagcagccttgagacaagatctgctttcataaacatttccagcgtctccatcatataaaatgcgtcatacacattgctgcttatcgtgagcgctccgtgatttgccagcaggatcgtccggctctgtggcttttccctaagaactctgcttatctcccgcggaacttctatcgtcgtcggcgtcgtataatccgtcaccgcgatccccttcagggagaataacacctccggcagagccaccttctcaaacgacacctccgacatggcatatcctgtcgtcacaggaggatgggcatggaccacggcccttgcctccgggcattctctgtagaccgcaagatgcatgcggatgtccctggcgggctttttcccttcaagcacatgtccttccatatccacctttgttatctggtctgcagtgagttttcccttgcagaagccggaagccgttataagaacttcctgttcggaaagacggatactgatatttccgtccgttcctacaagcagtcctttatcatagagagctctccctacctcctcaatatcctctttttgctgcatttccgtcttacacataccgttacctcttttctgtcttttttgtacgcaaacgagagcgtaagcctgaatatctctttacgctctcattttaacatcaatgtttggtcagcttagccgggtattttttagataattgccagactttttttagaacttatttttatttaaaatttattctttcttagctcctcattggccgccgccagcatctttgcgtatttttcttccctgccctgcagcatgctgatatacagcgcttctatgatacagagttccggaattctctttgccacggtctcattacacggattttttgtaaatgctgccgtgcgtatcacacagtcagacagttttgtaagcggagacaacggataatttgtaacggttatgatacgggccttctttgccttcgccgtctctgccacttgacagagcgtcctcgtactgcctgagtgggagataagaagcagtacgtccccttgtttcattccggaagcctccatgatctgtacgtcaaagtcagcggggcagactgcccgcagaccgatccttgagaacttaagatacgcgctgtacgccgccgtatacgcgtcaccggcccctgcggagaggatcttaccggcacgtgtgatataggaaaggctctcttcatacaccttcctgtccagcagatccagcgtatcatcaagcgcccgggcagccgcgtggaatacgctgcaaaggacagcctggctgtcctccccccttccgatatctccgtagggcaggagcgtttccggctcaaacgccgcttccgcgggcagcagcatctgcttcagctgcgcataaccattatagccgagcttctgcgcaagcctcacaaaggtggcctcgctgcacccggcccggccggccgactcagtgatggaatgaagcgcggcctcctgagggtgcaggagcacatagtcggccgcttttctctcggcgcctctgagtgtatcgtatatagctgttatctctgcttttactttactggatattttctgcattatgttcacccacccgcgccatcacaggcttcattgtacggtaaagtccgcggtagacccggtaccgttcatcgtacagatcttcgcgcgctttatccggttcatatgtgacgtccgtctgtacaaggctctgtatgtcggccgcactctggtaaagccctgcgcctcttccggccagaatcgcagctccgaaacatgcggcctctctcacctttaatgtagtcaccggcacccccatgatatccgccttcagcttcagacccgtacgggagcgggcgccgcctccggcacatctcacagtcctgaccgcaatgccggcctctttcatctgatccatgttaaggcgcatctcaaagcagagcgcttccagcacagccttcgctatatcgtaacggccggttgccagagtaagtcccagtatgccgcccttcatttccagatcacaatatggtgttccgctcccattcaaatacggaagcaccatcacgtgtgacggtccctcagggagctgctccatcacgtgatcatacaccgatattccctctgcggcggctattctcctgtcctcccggcagtattcttccacaaaccatctaagcagcgctcctccggtatggttcagtgcgaaggttgcatataatccgggaagcgcatgtatataacaaggatagaagctgtcaaacatgacagatccaagctttggtccctctgacacagcggtcagcacttctgccgtcccgtgggagtcaagcgccataccctcttccgtgattccggctcccacggcggcgcacgtctggtcatggccccccgctacaagtgcggcccccgggcagataccaagctctccggccaaagcccggtctatcgttccgaccactgtacccgacggcaccggcgtgccaagtttctcttcctgaatgtcaaaagccttcaatatctctttggaccacgttctcccggacaggtcaaacgcctgcgttctgcccgccattgtgtagtcaatgacgatctcgctgcttccgagctttcccatgataaagtctgcgtatgtcacgaacttatatgtcttctcatataagcattcgtcgtgccgctttatccacagtatttttataaaagaattcatcgggtgcgggcgcattccggtccttgaaaatatttcacaggcgccaaatctgtctgcgcacatccgggcctcttctctcccccggtaatccataccaagctgagccctggcgagcgcagtcctgtcccgatcgaccgggatcactgcgtctccctgcacggagacggaaatgctccggatattctgtccttcttccctgacggcttcccgtatgacttcctttgttatctcccacaccttctccgcatcctgacaggcatagccctcttttgtgtacagaatcccgtactcccggaacgcgtaccctcttgtcccgccttcttctgtaaataccattgccttggcgccggtcgtacctacatcaattccaagcagcatatgtttccctttcctgttcctcgtcatagaaatccgccctgacatccggtatatagttcagcgcctcataaatcaccggaagcacatcaccgtgaatacctacggcatgatggacatacggcccctttacaagcattgtctccacctttgaccagttgggaatttccacccacgcataggtgcctgtcgtctttggaccgtcgatcgttctggccttccccatcagcatcccgtatgttccgttatcaccgtcaaaccgcaggatcgatatctccccgggcttaagctctgccacgacagccccgggacaatgctcgggaaacgcaaaaggtcttgaaagctttgccttttcccttgcaagagagataggccacggaccacagtgctgcagcagctccccgttttcattctccggatggcgcaccgaccagtcggcaaaaaagcagggtgttctgcccattcccgcggcctggaccataatagccgtgaccgctccgtggatatctgtctcgcagacgaccggtatcccctcatctgtcagcagtgcatttgcgcagcacggcattacgtgaagtgcctgttggagtgcatcccagcactggatggcaaccgcgttgcattcgtttacgcgcgcgaaatatttcatcgcctctttcagacttgccacgcggcgcacagactcctttggaatgcatacgtccatatgttcatagatataacgctccgtctcttccacctctgcgctgtcggacgcctcaagctccagcaccttgtccgcaaattctaccatggttatgggaaatacctgaattccgaatttctccagcagttccccctcgttgaccatcatcgtccagaaatccgccgggcgtgtatcgatctgaaggatcctgcctctgcggaattctttgatcacattagccgctgccacgaagttcttaaatcccttttcaaactgcggactgtcaacgcggcagttcgggacataggtaaaggggaccttcattctcctcagcacctttcccgtcgcgaagagtccgcactgtgtatctctcagcctgctgccgtccggttccggcgcctcgtctctcggtccccacaaaaggacaggaacatgaagggctgccgccaccttgccgcagctgtgctcagaaccaaaattgcagtgagggataaacagggcgtcaacctttgccctgctgaacttgtctatgaccggctgtacatcttctgcacaccggagaagtccctcctcgttaatatcctcaatgtcaacaaactctacctcccattctctcagccggtccgctatcatcttcttatactttaccgcgtcctgtgcgctgaatatgcgtcttctcgtcggggcatacccgatcactaccctatgatccatatctttgttctcctttccttctccctctgtcagcagccggtcatctcatcctgcattctgcgcagctgcagtaatacagaacggttgtcaagttccaccatgtcatatgtgatcacttcgtcttttttaatgtctcttttcagcaccgctcctttcgcgagccctaccggaagcatattgccttccctcgcggtctccgccagctcgatcgaggcgcggtagcagtattctccgatggcgtccagcacctctccggctttcaggtccttctttgccaccgtaatacactcgcttgtcagatgatccatcgggtgagcggtcgattctccatagacagcggcctgtaccgcagtgatcggcgtctcgatggaacagagatgatacgggcggtaaagcaggtaattcggcccctctcccatgtctctttgcacaagcccgtctatgatcctcttattgtccgtcgtcacaatgacaaacacacccggattgatatccccgatcccatagtccaccacacctgtctggtccaggatccccccctgctccttcagggagaataccctggccaggtcttttacgttacattctggtccgtgcatcccccttacatccggctttagcccggtagcgttcgatactgcgcacatctcgatcatcgtcttggaaccgtccacaaattcaatgagcattctcggattcatgtcccgcttcgtcgctttctccttccacttatgcataccgggatcggcatagatatcgagcgggttgtttttgccctttcccgcggccaccacttcaaatccaagcgcctttgcaaaccggtacacttcgataatggagccgggttcatctccggcggtaagagagtagacgatgccggcctgttcacacagcctgcgcagaaggggcccgatggtaatgtcacattctacattcatcatcacaatatgctttttgtggaggatacactccatcgttaccctcgcccccatctccggcgagccggtcgcatcgatcacattcgtgatctgcgccgcctgtaccgcggtcttataatccgtcgtcacagcctttttccccgcggcgatagctttttcagcctccccggccgtgcgcacctccactacctcgcactgacagcctgcctgacggtatgcttctgcggcgatgtccgcccggacatctaccacaatgtcacattcaattcccttcattccctcgatctgggccacgatatcctttcccatctgtccggccccgataagtgctgtccgcactggtgtcccggctctttcaagttcctctaactttgtgtcgatctcgtacatgttctcctgccttcctttctttgtctgctcttcttttttccggcttttcaggcccacgggtccacgagcaccttcagcgcctctccccgcgtcaccatctgtatcccttccacgatctcttcaagagacaccttcgcgctcaagtattttccggtgcttatcttcccttcctctatcgtcctgagcgcatcctccagacctgtggaagaataagaaaatgctccgagcaccatgatctcattatagtggatcttgttcgagtcaagcgtcgtcatcggactgctcccgggcagtccgccgtatatgactacccgccctctcttctttacaagttcaagcgcctgctgctgcgccgccgcgttgggcaccgcacatatgactacgtccgcccccggcccgataagcgctttgactttttctgccgcctcctttggatctttgttgtagatcagatgttcaaatccaaacttccgggcctgttccatgcgccctctggcgagcatgaccgtccgaaatgcgcctctcgccttcgccacctccatgtggagacaaccgaccggcccgtcgccgatcacaacaaccgtgtctccgtaagatatgtgattatattcctggcaggccactaccccggacaccggctctgcaaacgccgcgtggtcatagctcatgtcatcgggtatatgctctacaaatccccgttccagcacgatcttcggaaccgcgatatactgggcgaatccgccgggaaaatgtgtgccgagcatgcggtggtcatcacacagattcaccagccccctgcggcagtaatagcactctccacagcttacatccggcgcaagcgccacccggtcgccggtggcaaaccggctcacgccttccgacacctcagcgacttccccggctatctcgtgacccatgatctgatctgtctttccgtttctgagtccgcttcggtagttgcgtatgtccccgccgcagatcccgcagaccgctacttttacaagaagccccccgtccggacaggacggaatctccaggctttcgatctccatatgttcaatgcctttgaatacggccgccttcatcatacctttcatcaggatcctcctttccaagaagccgttctcctaccgcccctttcggatgaatgacggcaaactgctctttcgtgtactcggtatactgcatgagggcaatgcagacagcgtcaaataccgagaggaccgccagcgtactggctgttgccagcatattgaatcggcatggttcccgccctgctttcacctgcaggcagagatccgccgcctttccgatctttgacgcttcatcctccgtcactcccacgagcaccgcccccttgctcctgcacggcgggataagctgtaccagttcctccgtattgccgcccttgctgatgagaatgagtatgtcattttcctttagaactccaagtcccccgtgcaccgcgtccgacggcgtgagaaatacggcagtgcattcgatacagttcagagaatgtactactttcctggccgccatggctgatgtaccgcagcccgccacgaccaccttccctttcccgtctccgataagctctacaagcctggccgccttttccatatccagctggccggacaatgcccggattgcctcgctttcctccaggatcgtccgttttacttcagaaattatgtcttttctgtccaatgccatccctccgttttcatttttttcatatataagtgaaaaatttctttctatgttctgtaatttatcacagccggatttatttttaagcgggaggttttttagaaaataaggagaattttttacagaggcagattttttcttgaacagaaatctgggatgtgataccatggagacacgaatcacatattccgaaattcttatttcatatacggcagttcgccgtacttatccaatgtcattgtcatatcaaaaatgtaagggagggatgcctatgcgtgctgttctcgagcgtgtttgaaaattgctggaatgaattttcaaacacgctttagtgtattgtatcgttggtaatcatggatgatttatggtaaaataaaggagaaatatatgaacaaaagacaaaaactgataccattaaacagcctgaaccttacggaccggtttctgtttgaggaagtgatggaagacccgcttatacataaagaggtgctcagcattatcttcggcagggagattcctcttctcgaaaaaaatgagacggagaaagaactcagaatctcaccggaagcccgctccgtccgcatggatgtcttctccatggacatggaaaaaactgtttataacacagagatgcagaaacaacgcagagcagacctgtccaggcggagccgctactaccagtcactgaccgatatctccctgcttgatccgggaatcccggattacagtacgctgaatgactcctatatcattatgataacgccctttgatctgttcggctgcgggaagtaccaatataccttccgttctgtgtgtgaggaagagccgcaatgtattcttgaagacggagcgacgcggatatttctgaacacccggggaaggaatgaagacgaagtctcagcggagctcgtacaatttctgcattatgtagagcacacgacagacgaagcggccgagcagacaggaagcgagcggataaaacacatccatgaccgggtccgaaaggtgagaaacagtgaggaagtcggggtgaagtatatgcaggcatgggaagaaaaatattacgagaaggaagaagcgagaaaggaagggctgcaggagggccgcgaagaaggtcgcgaagaaggtcgcaaagaaggtcgcaaacaaggcgccagaaataaactgaaagaacagatcaaaaagaaacttgacaagggaaagacagtcgatgagatcgccgatgcgcttgaggaaagcgctgattccatccagacgctgatcaaagaaattgagggagattgagattgttttggggtagggggtgtacggcccaccccccctgctccattgcaacactccgggaatccggagggaagaaagttaggcaccctgaggcgttcaggtggcgaggaagggggcaccgtccccccagcaacctaacttcctccccccactccctccatccgatactgggacggggtctttcccatgtgttttacgaatatctcacgaaaatatctggtatctttatatccgaccgcctcggccacttcatttacggtaagacttgttgtctccagcagtacaagggctttttttattcttacgtctgtgatatagtcaatgaacttcatattcatctcttttttaaagagctggcttaagtaacttggattgatgaagaattttcctgcgatcgtcccaagacttacgtctttgctgtaatgttcatctacgtacgccaggatatctgttatgagtgtctttccgctgctcttcttacggtcgtcaaactgccggctgataacgcacaatgtctgttccagatatttccggaactcttccagtccggtgttttttacggcctgcctgtccagcctttccagcatcttcaccgcagtctccgtatcttttcctttttctgcaagcagcttcgccgccagcatatagatatcaagacacattattttcacattcgtataggtgagtccttctttttttactctggagagcatctcatctacaaactgcctgattcccgcctcattttgtgatttgatgtatccttccagtatattcttgtcaaactcattcagcagccgcatttccagtcttttttgttttgtcccttcacagatctctacttcggaaagacccagcatggaacagcggagacctgattcgagcgcttcagcataactgacacacagatcttccgtccgccgcacttcctttcctattcccgccgcggcgtccaagccatatatactctttagcacatttaagagatggtgcgccttttcacgcagaaaatgagctgcaagggaagtctctgtgttcaaaataataataaactggttttctcccttctcatgcacaaaagacgtacatccgcagtgaagaaatacctcatccataatattacacacggcaaactgcaataccgcaagtcccgacacgtcctcaaaccccgggacagaccgtatatcctggacgatcacggccaataccctgtgatatgtatctgtgaaccggatccccatctcctccagatctttctcaagctccaccgtatccatggatgaatctgcacggacaagttccgtgagatagcggctcttttttaaaaatttcccctcctccgcctggctcttgacgtgccgtctgtccctgatctgctcttttttctcgtcaagctccttaatgagacgcgccgtcacttctctgaattccccgttgtcaatgggcttcagcagataatccttaacctccagctgcagggctgttctggcatattcaaaattcgtatatccgcttatgacgacaaactgaaggtacgggttatactgccttgccctgcttatgaactccagcccgtccaccagcggcatcctgatatccacgtatacgatatccacctggttattctgtatataatgcagcgcctccagagcgttttcctggggcggcgccagcttaagctgcgggaaaaagcgttccagcttcctgcatatccctctgcggatgatctcctcgtcatctacgaccaatgctgcatacatatttcaccctcctttacgttctgacagggagtttgatacagacctttgtccctgtcccttcttcactcgtaattgtaataccgtattcctgtccaaaatacagtttaatcctcgcatttgtgttttccagtccaatgcttctgtggtttttaacgtaatccacttcatgcaccatcttctgctctgcgcttctggccagcttctcattcagttccataagctgtccgggggcgatacccgtaccgttgtcctccacctccgcgtacaggcagtcttcctttctgtatacgcggatcgtcacatggcatttatccagcacattttccattccatgcactaccgcgttctccaccataggctggatcaacagctttacaatatacagttccctgcattcattctgaatatcatacctgacctccagcttacccccgaagcgcagcttctggatgagcatataattctctatatgaacaatttcatcctgcacatgtacgaactcctggccccggttgatggaataacggaaaattttagacaacgcctggcacgcgtcgctgatctcatccgccccctcttcctctgccatcatatctatcgtctgcagtgtattgtacagaaagtgaggattgatctgagcctgcagcgcattcagctccgcctccttctggtatatctccgactggtacacgttctctatcagctgttttgtccgctctaccattttgtcaaaggacagggtaagctgtccgatctcatccgacgcacccgtagccgccctgatatcaaaatctccttctcctacctgatacatctttctctgcagacgggcgacggggtcgctgatcgtcttgcttatataactcgcgaaatagacggacagcacaacgcagaataccgccgtcagaataagaaacagacgaagccggttaatactgtccataatatatttattatccacgacagagataacgctccagccggtaaccgccgatgtgctgaacacaagataacctttttccgaaagagactccatataaccgttctccatggtgagcagttcgctcaccctcgcctcccggtactgcgtgcctatgtagtcagaatccggatgatagatgatctttttattattatcgatgatcagacactgctggtattcattgctgttgacgctctgcagcacattccccaggatatcgctgttcatatggacaataaggcatccgatctccttgcctgatctatagttgtagatcttctttacaatagaaaacagtttctgaggctcgcccgtgcttatgtaagagctgctgtcatactgggacaggatactcaccccggctccgctctgtttcatatccgcaaaccagcctgtccgcgtaaaatcatagtccgccgtcaggctcagcttatttttgtctgatccatatacgctgccgttgtaggaacagacaaagacatcctccactgagaaataggccgcataggactcattcaggatctgccgcatcgttttatctttgctgtagtattcttctatcgtcccgggcttttcctcctgcaagactgtgcagagttcttcgttcagacatacttgtgccgaaacgtccagaaccttttggatctcaccctcgatattctctcccatctggttcatcgtctcctggatggagtcaagcatctgcgtcctgatagactgctcactgaatgtcatgctgaaatagccaagcagtgagacaagtacagcgataacgagtataaagccgataaacagcttgtttttcatttttagatctttatactttattatcttcatatgcccgcctgcctttttactatctgaacacctaaaatatctgaagacctaaaatatgtctccttgaaaaaacactgcttttattatattattattacattaatttttctacagttaccatgttttaccgcagggggttatgacaaatatgcacaaaaagctcgtcacaaaaatattattggcagtgtcagcggcctgcgccgtcatatccctcggcttcttatattcctatttaaacagttctcccaaaacgtcgaaggaaacttactccatcaatatactgacttacaaagacatcccgctttccacactggacggtttccacaacaaatacccggactataagatcaatattgagcggtattccaagaacggctacctctcttttctggatgccaggcttaatcaggatgactccgcagatatcatcgagatccccgcggaagcttattccaaatatatttataacaacacgctgcttcccataacagatatggatgcttttacccgtattgatgaaagagcgcttgactacctcaaggaaatatcccgctcagataaatatttcggtattccgtatcagagtaattatctcggtgtctggtacaatgtctcattgtttgaaaagtataagctggaaccgcccgataccttacagcgctttatgaaagcgtgccgcgtcttcaaagaaaacggcattgtaccgctctctgcaggacttgccgacagcgcctcggccaatgaccttatgacactgctgaccgccgacgctttttccggcgccggttcccctgtcaccgcgtcttcaggctttcggggtctggaggatccgtttcatctcgatgccctgcggatatgctatgatatgcgcacagaaggatatctgtcggatacaggtctccgcctgacgggagaacaggctttccaggcatttctggactccacatatgcgatgacggtagcgccggaaacttatatctccatggtcaatgattctgtgctgcagcagatcgatattgacgtgtgcggattttatccggcggcgggcagcggccaaagctttgttataggaagtccggtggattccgttatcggcatctgtaaagaaagcgccaatatagacatctgccgtacattcctcgactactacacccggtacgaaactgtcttccagtacatcgaggacacacggacaatgactaacattcagaattattctgtaaatgaaacacttaccgcctcctggaagaagataaaaagccagaactgctacatccctgctgaacacttttatctgtctccctatacaggaggcagagaactgcactccctgccgcaggaattattctatcaccttataacgcccgaagaatttacccaaaaagcactggacctttcccattaacaggaggaatctatgaaaaaaaacaaattacttctgccgctgatcttaacaggcctcctctgtctcgtactgctgtctgccattatgacgcaaaagcagtccgcggatactttgccggacacaaaagatacttcccaaagtgaagaatatatctgggtggccactatgacaggccacagcatgttccaggagaacgacattccggccttccgccagttcggcgccgacaggcatgtcacaacaacgatcctcggtccggaagaatacgacattcccggacagatacaggcgatggaagaagcgatctcccgcagtcccgccggtatcgtagtgctcggcatggagcagagtctcgcccccgtcatcgacaaagcgatacggcagggcattccggtcgtgacagtagattccgacgtatccacttccaaacggatcgccttcgcgggctcagactggtatgagatcggagtgacccaggcagaggctatggtccggcttatcggcggcaagggaaaggtggccgtcatgggcatcggcggcgcggatacgacggaagccgcatttgagggctatcactctgttattgacaactatccggacatcactgtcatcggggaatatgacgacatggccaactatgacgagtccgaacggatcacaaagctcatcgtggagacccatcccgatgtcgccggcatctccggttttaattccaacagtgccatcggtatcacaaacggtctcaggagcagttctgcggatcatgatatcaaagtgaccgccatggatatcgaaccggacaacctggaacttgtggagagcggcgatgtagatgtcatcatcggacagaaacgggccgtgttcacgtattacgcggcgtccatgctctatgatatcaatcattcctcgatcacagtcaacaatctggccaaaggcgcagcctccgtcatcccggatacggtatacaccggccttatcacagtaaaccgggagaatctgtacacgtattttcctgatatgaaatgatatgaaacagaggccgtatgcatcaggcctctgttttctctgtcttttactctattctcttaccagattttcatttcttatatttctggcctcagccttcgccatatagcgcccccttatactgtctagaaatacggcgagaaaaataattcccgctgatatgagcggctggatatacatatctacctgcatatagacaagccctgactggatcatctgtatcatgaccgcgccaagtatggtgccggagactttaccgctgccgccggcaaggctcgtacctcccaggacagccgcggcaatggcattgaattcctccccctttccaaaggaagcattcacgatcccgatctgggccaccgagatgatccctccgatccccgccagcagggcactcagcatatacaccgtaaacaaaatcttattgttgctgattcctgctttgcgcgcgtcctccggatcattgccgacagcatatacctgccgtccaagcctcgttctggccagaaacagcgccgcggccgctgcaatgagcaaaaacaggaggatcgccataggtatgccggcaatcttctgagagccgagtgaggtgatagatttggggagattcacggactccgaatgcgtcatccatgttccgagcgcgcgtcctgccgtcattgttccaagtgttgtcacgaacgggaggatcttaagctttatgatacagaacgcattaaaaagcccgacaagcagcgccacaccgataccggcacatacacccacggctgtgggaacatggaacctggctatcagaagtccggtggaggctgcggacagatacatgacagagccgaccgacagatcgatcccagccgttagcagcacgaacatgatcccgatcccgatgatcccgacgtaagaagaattcagtataatattgctgaatgatgccatactcaggaacttcggcgaaaacaccccaaacagaacaaatatgatcacaaacagcagcagcggaatatttttaaataacagcctgttcgcactctcttttgacttcatattattcatcccccttcccgttctggttaaatgcggctttcattataacttccttgtcaaactcttcccgcttaagctctccgcgcacttctccgttccccatgattatgatgcggtcacaaattcccatcagctcctcaagctccgaggagatgacccagatcccttttccttcggatgccagcttatttatgatagaatatacttcaaactttgcccccacatcgattccgcgcgtcggctcgtccacaataagcaggtccggacttccaagcagccatttaccgatcaccaccttctgctgattaccgccgctcatactctttgcgggatttgtcccgatgggcggacattttattttaagcgtctccaccatatcctgagtgctctgttttacagaagagtcatctacgatcttgagtttcgtgcgggccttttccggcaccgatacgagcgaaagattgtcgcgtatagtaaaatccatgaacagaccttcttctctgcggttttctgtgacaaatgccactttatttttaatggcaagtcttgggctgatctttctgatctctctgccgtggataaatattttcccttcctcgtaaggatccagtccgtatacgatccttgcaagctcacttcttcccgagcccataagtccgaacattccgacaacttcgcctttatacaccttcatgctcaccttgtgcgtgatccccttctgcgagatgtctttcagttccagaaccggttctttcgccggacggtttgtcttttccggatagagttggtcgatctctcttccgatcatggaactgatcatgcggttgaccgtgtagttctctttcttatcacgatctgtgatcatgccgtctctcagcacgataatatgatctgaaagccgctgcacatccgcaagtatatgggagatgtagataatggatttcccttccttaagaagccgctctattatgtcaaacagctttctcgtctccctcgccgtaagagaagtcgtcggctcgtcaaaaataaatatctgcggatccgaggacagcgctttcgcgatctctacgagctggcgctcacccggcgacagcttttccacgatcgtctccgggggaacatccaggtccaccgacgacagcacttcctttactttatccgccaccgcggacttccttatgagcggagttccgggaatacggggataagaatcaatatacatattgtcaatgatgctcagatttgtgaacaggttcaattcctgatgtataaatgcgatccctgcctttgcggcatccgacggcttctgcggctcatagggatcaccgttgaggtagagcttcccgctgtccgccttaagaactccaccgactatattcataagtgtagatttcccggcgccgttttctccgataaggctgagcagttctcctttttccagaccaaaactgacgtcctttaatgctgcgatcccaaagaaactttttgcaatatgttctaactgtaatacgtattcactcatattaaacacctgcctcattctgcgttgtcattttcacggccagccttgtcctcaccacatcgaggaacgcggcggccagtattacaaagcctttcactatattgatcgtgtagtacgacaggttaaacaagttcagggcgttgaataatatcgtatagaacaacacgccgaacacggtccacgtaacctttccctttcctccgagcaggctcgtgccgcccagtaccgccgcccctacaatatccattgtcaagtcttctcccaaagtaggacgccccatgttaagccgtgcggaatagatggcagaacccgcggcggcgcagaagccgctgaatgcatagcagaataccgtaaccgtctttgtcggtacgccggacacgatacttgccgtctcatttgctccggttgagtagatccattttccaagcacgagtttcttcaatatgaaccaggcgatgaccgtcaccgtcacggtcaggaccgccgcatacggaatgattcctccaagtgaaccttttcccagctctttaaatcccttcggcagtcccattacgttcctggactgtgtaagaaatatagcaaagttaagtaaaaacatttgtgtgacgagcgtgaccataaacggcggcatcttaaaccgcgcgacgaaaaatccgttgaacattccgatcagtgtcccgatcacaagcattgccagaatacagagcggtattgccataccggaatctgaaagcggtcctccttctggcccgatcagccaaccccaaagaggcgtggaagaaaagatatcctcctgaaaggaactgctcataaggacagtcccgataacacttgtaactcctatgacagagacctgcgacaggtcgatgccccccagcagcaggacaaacgtctgtccgacagcaacgacgagcagcggccacagattggacattacattgagaagattgctcctcgtgatgatcctcggtacaaatgggatgacacagataaagcatatgacagtgagataaaatataaagtattctgacataaacatattcatgatcatctgttttgcatttctcttaccgccctttatctgtgttttcttattaaaaacacccatataataacctccttgtattcgtttgggccgcgcgccggcagttcactgccgggcggcggcccttatgccttttatttttcagcgcttactgcgttgccccacatatccattctcttttctgccagattaccctgcgtgagagcaaatcccgggtcttccacgatttcgtccggtgttgtctcgccgtcttctatagccttgatgattccgttcatagccgcgtcggcctcatagaataagtcctggacacctgtagcgtccacatatccctcgtcgataagctttcctgctgtggaatccccgtcaagtcctccaagtatgatgtgaccatcgtcccctgctttctgccactttcctaaaggttccacaacggactgaatggttgggaagaggaaatctgatgaggagaagataaagtcgatatccggattggcctggactgcgctctgcagattggcaagcgcggtagcagcgtcccactctgtaggcacttcgatcacttcattaaagatatctttttccttctcgaccgccgcgtagaatccattcttacgttctatcgcgttcggatccccaaggtctcctacgagtatacaaggtgtaagcttctttccggtcttctcgaattttgccttcgcctgctctaccatataatccactgtcgcttctgccgtcgtcgcgttgtcgcacacaaccgtgatgttgctgccttcatcagacgtaggcggacggttaaagatgacgatcggtacttcggactcatttgccgcggcggtcactgtcacggccgtatccccgtctaccggtatcataatgattccgtcgatatcctgggtgagtgcgtcgttcacctgctccagctgcttgtttgcatccccctgacagttcagttcgatcaccttgtagccttcatccttcagggtgtctgtgatgatctcatgggcagccacccagaactccgtctccaggtcttcaaagctgaatgcgatcgtaacatctttactgcccccctctttgctgtctttggattccttcttgtcggcgcagcccattaggagcgcagccatcattgccgccgccagcaaaacactcaacaatttcttcataacattttcctccgttttctttagaatgaattgtttgttgtgattagagtataagaaaaagagacgccttttcatagacgtctctttttagataatgcggcggaatttttttagtcagccggccctccgtgcgggatggatcttcagcatccccctcctgctaccacagtcccagcgtatgctgcatgatcagactcaccagcgttattccgatccagcaggccattcccatgagtatcggtttgcctccggtctttacaagcttgatgatgtttgtatgaagtccgatcgcagccatagccattatgatgaagaatttggacaattctttcaggggcatgaacacatccgcggagattcccgcgcttaccgccacggtcgttatgacggaagcgccgataaagtacaggataaaaaatgggaatacctgttttaatgatacctttcccgcagcttctttctctgcctttctcgtcctgatgaacgccagcacgagagtgatcggaatgatcgcaagtgtccttgtaagttttacagtcaccgccttgtcaagcgtggcgctgccgagtccgaacatgctgtcccacgtcgacgcggccgccgttacagaggaagtgtcgttcaccgccgtaccggcaaagataccgaacgcttctcccgagctgctcgaaaatccaagcgctgtgccaagcatcggaaacaataccgcggccagcacgttgaagaaaaatatgaccgatatggcctgtgccacttcctcgtcatccgcatctatgaccggcgctgtggccgctatggctgatcctccgcatatggaagacccgacgccgacaagcgtcgatattttccccgggatgtgaagcgctctgtgcagcacgtaggcgatgatgagtgatgtggatatcgtggcgattatgatcggcagcgactgccttcccgtctcaaggatcacccgcaggttcagtccgaacccgagaaggacgaccgcatactgcaggatcttcttggacgtgaacttgatcccgctctccagacttcccttttcttttataaacagtgtaatgaccatgcctgccagtatggcgatcaccgggcctccgatgatcggaaactgttttcccagaaaccatgacggcactgctatggcgatacacacaagcatacctttccagtttttctttacaaattccatctcttttcctccagataacttttttctcacgcaacatgaaaataataccattaaattatcataatgtaaaattataattatttatttttttataagtatatgttatcattttatcatcagttaaaaccggcctgccgtctgaggcagcgccgacgtacagaggaggacgctatgctggacaacagaaccgagacttttctcgctgtctgccatgagatgagctttacaaaggccgccaggacacttcacgtatcgcagcccgcagtatcacagcacattcagtatcttgaggactactacggaacgaagcttttccgctttgagggaaagaagatctttctcacagacgccggagagctgctccggaaatcattcaccgctctgagaaacaacgagatctacctgcgggaacagctttcgatgctccaaaacaaaaggaatacgctccgcctcggcgcaacactcaccgtcggcgagtacatgatatcagatccgcttatccgctatctgagttctcacccggattcggacataaccgtcacggtagccaatacaaaaaagcttctgagcagtcttgacgatggtaagatcgattttgccctgctggaaggggattacccgcacgcctcctacagacatcagacttaccggcaagaacagtttatccctgtctgcagccagagccacgcgttcatacggcgtcctgagacactatgtgatcttacgtcagagagcctcatcatccgtgagccgggctccggcacgcgcaagatcatggaacaggcgctggaagatgcagacatcacactgaaagactttgccaacgtcatcacgatcggcaatatgaatacgataaaagagctcgttacggcagactgcggtataacattcttatacaaaactgccgtaaaaaaagagctggaggatggaattctcaaagaaatagaattgacatcccccggcatcacgcacgagatctcgatcgtatggaaaaagaataatctgtttgaagcttcctttgaacagttgttcaacgaattatttttctgatcaaatgtacttcttcccgctttttgatgcccgcagacgtgtcatcgcccttgcgagggacgcctgggacagataatattcctgtatgctctgcttctgtctcagacgttcctgcgcacgctccttggcctctctggcccgcaggacgtcgatatcctccggccgttccgcggcattgacaagcacagagacccggttgtttattatctctgcaaatccttttgatacaaccgccgtgttccattccccttcctttgtctgaaagcgcagctcaccgatctccaccgctacgaccatattttcatggtgggccagcacgcctttctgtccatcgggtgtcggcaggatcacattctggcagcggccttcaaagaacactttatcgctgcagatgatttttaaaaagaatgtattcatatcttacacttcctttttggctttttccgctgcttcttcgatcgttcccacattaaaaaacgcgttttccggatactcatccatctctccgtcaatgatcgccttaaaaccacgcaccgtgtcctttaggggcacatatcttcccttgacgccggtgaaggtctcggccaccgagaaaggctgcgacaagaatttctggatctttctcgcccggctgaccgtccttttgtcttcctccgaaagttcctccattcccaggatggctatgatatcctgcagttctttatatttctgcagtatctcctgcacctttctggcgacccggtagtgctcctcgccgaccacgtccgcctccagtatgcgggacgtggattccagcggatccaccgcgggataaatgccctgctccacgatcttccttgacagaactgtcgttgcgtcgagatgagagaacgttgtcgcaggcgccgggtccgtcaggtcatcggccggtacatatactgcctgcaccgatgtgacggaaccgttcttcgtcgacgcgatccgctcctggagcgcgcccatctcctgcgcaagcgtcggctggtatccgacggccgacggcatgcggccgagcagcgcggagacttcggagcccgcctgcacgaaccggaagatattgtcgataaagagcagtacattctggtgctcctcatcccggaaatactctgccatcgtaaggccggtctccgccacacgcatacgcgctcccggcggctcattcatctgcccgaacacgagcgccgtcttatccagcactccagattcacccatctctgtccacagatcattaccttccctggagcgctctcccacgccggtaaatatagaatagcctccgtgttcagtcgcaatattatggatcagctcctgtatcagtacggtcttgcctacgccggctccgccgaaaagtcctatcttcccgcccttggcatacggtgtcagcagatcgatcaccttgatccccgtctccagcacttctaccgcgggactctgctcctcaaagcctggagccttcctgtggatctcccagcggcggctgccgctgtctatcgcttctttgccgtcgatcgtctcaccgagtacattaaacagacgtccgagcgtctgctctccaaccggcaccttgatccctgctcctgtggcagtcacctccatgcccctgtaaagcccgtcactcgatgcaagcataatacagcgggcagtattattacccgtgtgctgggcaacctccataacggaccgcctcccgttattgtccacttccagcgcatcttttatgaacggaaggtcctctctgctgtcaaattccacatcgacgaccggtcccataacctgtacaattctaccttttaccataatgttgatttcacttccttttctgtgcattggctccgccgatcacctctgtaagctcctgggtgatatctgcctgccgcacacggttataagtcatgtttaattcactcagcatctgggatgcactgtccgtcgcgttctgcatcgcctgcatacgtgaattctgctcgctgcagtacgcttccacaaggcatccatagatgatcccgttgatatagttaggtacaatactgtccatcacgctgtgggcggaaggatacagcgtgatctcctccctgtacacaccagacagatatggtatattttccggtgtaaagtccagcctcttaagaggcagaagcttgatcatctccgcctccgcctgcatggcatttttcatacgggtatagatgatgtagatatcatccagttcaccgctctcaaacagctccgtcatcttcaccgtgatgaggcgtgctctgtgcatcgtcggattctgtactgtgtaccggaagtccgtatcgacttcaagaccgtcctgtttggaaaaaaactggcgtcccagctctccgagcacgaacagtctgtgctctcccggctcctttagcttctcctgcgcaagcttgatcacgttatgattataagctccggcaagccccttatcggccgtgatgacaatgcatcccgtctttcttctttccggcggcgtcttttcacgcccgtcaaaaaagtggctgtgcatgtcaggtacatgtctgagtattctggcgatctccgcctgcatggcatagaaaaacggttccgtgtcagccagcttcttcctggcctgtttcatcttggaggaagagataagatacatggcattcgtgatcttcttcgtctcctggatacctgccatccgttctttcagttctcttgcatttgccatagttacacctgcttacctgttttctttatattccccggccgctttgatgatccggtctgtcagctcatcgtcaagcgcctgtttctcttctatctctttccctatctccggatatttcttttcaatataacgcagcattcccatctggaactcttttatatcctttgtgtccacatcaagcatcgccttgtgcgttgccgcgcagagtgtaatgacctgctcagacaggctgagcggacggcacagcggctgcttcagaagctccgtcaggcaggcgccgtacttaagctgcatcttcgtggcgtcatccaggtctgaactaaactgtgtaaaggactccatctcacgggcctgggcaaggtctatacgcacacttcccgaagcctttttcatcgcctttgtctgcgcagcgccccccacacgggatacggacaggccgacgttgaccgcaggcctcatccccgcattgaacaagtcgctttccaggaatatctgtccgtctgttatggatatcacattcgtcgggatatatgccgatacatccccagcctgtgtctcgatgacaggcagcgcggttatggaaccccctcccgcctccttgctcagacggctgctccgctccagaagccttgaatgaagatagaacacatctccggggtaagcctctcttcccggggaacggccaaggagaagggatatggcccggtaggccaccgcatgctttgacaggtcgtcatacacgatgagcacatcttttccctggtacataaaatattctgcaagcgccgtcgcagaataggggactatatactgaagcggcgcgcactcgctggccgtggaacagaataccgtcgtgtaatccagcgcgccgtacgaacgcagcgtgttgacaagctgtgccaccgtggacgccttctggccgatcgcaacgtagatgcagatgacatccttccccttctgattcaatatcgtatctaccgcgatggatgtcttgccggtctgccggtcgccgatgatcagctccctctggccgcggccgataggaaacatagagtcaatagacaaaattccggtctccagcggcacactgaccgatcggcgctccacgatcccgggcgcctcctgctctaccgggcggtaatcatctgcctcgatccctccgagaccgtcgatcggcgctccgagcgcatccacgatccttcctatatacttctccccgacaggaactcccgcccgtttcccggtcctcgccgccttcgtcccttcctttatatctgaatcatctccgaagagaatacagcttatctcattctgccttatatcctgcaccatgcccttaagccctgtctccagagtgatgatctcaccgtacatggcgttgtctatgccatagacagtggcaattccatcgccgacagaaacaacggaaccggtttccctgtctctgcataccatatcataattttctatctcttctctaaggatagatataatttcatctgaactgatcgcgctcaatcccttcacctccaggttaatttttgctccagcccctttaagcggcccagtacggaatagtcatattctctgccgtttacacgcagggtgaatcctccgatcaatgacgtattctcctccatctcccagcgcacgccggatgctccgtattgtctgcatatgaactgttccatcttttcaagccgttctgcgtcgggcggttctgcatagatcaggccggccgttatgataccggccttcttaagcctctgctccctgtacatatctatactttccgccacttctcctatccctccgcggtccgcggctgccttgagaaagttcctcacacgctccggaaatacacggtcaatgacacggcctctctgcaccttacttataacagggctttcaagcatccccttaagttccgggcagctgtccagaatctggaccgtacggtccaattcctcctgaggaaccgcaagctcatccagtaccgccgcatacctgaccgcagtcatagtccggcggccgcgcctagtcttccctgtcttcatgactatcacctgcttcttccaaaaataaatcataggctgactggctgtcatccggtccgccataccctgtcacgatctttttggcggcgtccatggccagcttcgcaacttctgtcttcatgcgaagcatcgtctgctctctttccgcgctgatggcatctctggcagatcgaagcattttgtccgcccggtcatcggcatcgctcacgatacggtcatattcatcctttgcatccatcccggcctgctcaagcatctttcgggactcttccctggctcctcttaaggagtcctcatactgccgctttagctcaagcgctttttcctgctcgctccgggcattgttaagcccatctgcgatcatagcttctcttttctccatgatattcgtaatggggcggatcaaaaatctgcgcagcagcaggaagagcacaagcaggtttatcatctctaacacaagattaaagtctaatctcagcaccttccgtacctcctcttattttaagaagaaaacaatcagcagagcgataataaacccatagatagcagttgcctccgcaagtgcacatccgaggatcagcgtcttactgatcttgccttctgcctccggctgccttgcgatcgcttctgtcgccttgccggtggcgatcccgatgccgattccagctccaagacctgtcaatactgcaactcctgctccaatagctataattgtacccatcataattcttctttatctccttttctgattttttactattccatttcctcgttcatgaataacgcagtgaggaacacaaatacatatgcctgcagcaacccgtcaaatatatcaaaataaaaactgagcggaatcggtacaagcagcggaacgaccagcttgatcagttccatcacgacaaaaccaccgagcatattgccaaacagccgcatacagagcgacagcggcctgataaacacctccagcaccatgataggcgccactacggggacaggctctgcaaaatgcctgagccagtgctttcctccgttcctcctgatccccgaatattctatgaggatcatgctcatgactgccagcgcggccgtcacgttcaggtcctttgtcggcggtttaaatccgagcagcccgatcacatttgaaacggccagatagagcgccaccgtgatgagataaggtatgtacctcttattctccttcccgatgatcccctcaaagaaatcctgtgcccagccgatggcagattccagcgcaagctgtaccctgccgggatgctcgacactcagattcctcacaaatacaactgacagaaccgtgagggcagccataatgatccatgttacgacgatagattcatctacggctattcctccgaataccgggatcgtaaaaactgtctgacaattcaactcttccaacagattcttcgttagctcttccgtattatccccttccttcgtgtctaatttctctgtcatttaaaaaactgccggacacctgaaaacgaaagcatccgaaagttgtatacacattactgccaataaaataatttgtcaataactcttcctattaaataaacaaacatgtaaattcatattttttagtaatttttttacaatatgcctgtctgcgttttcacctttttatttattttttccgttttaaaatgacctttcagcaccttgaaattttcaagattaaatttatacaatttttctccgattttttaacatttttttgtatatcaaaaaatattttttggtgatttttacatgcgcgcaaaacaggcagcgggcctgaaccgccctgctgcctgttcacattttcgttctcattttccgttacatgcggtctccgctgtactctgtcctcggttctcccgaatagatacagaacgtattctttccggagcgtttcgcctgatacagcgcaatatccgcatgctcatacagcgaatcatacgcgtctccaaaatcaggacaaagagcgatcccaatgctgatcgttgtctggaattccctcccctgctccgtaacgtgggtacgcacagccgccgcgttcagccttctcgccttatcttcgatcgttttaatggaacgcagatttaccgcatacacgcagaactcgtctccgccgatcctccctataatatctctgcgccggaattgggaacggatcacgtttcccatctcatacaaaaggttgtccccggccctgtgcccaaaggagtcgtttaccagcttaaagttatccatatctatgataaacatggcgcccgacacgattctctcgccgagctggatatcaatatatttttccagcgcggtccggttgtacagccccgtaacgccgtcgatctgcgccgcgttcagcagttcattttcctgctccacacactcgcttacatccatcacgtcaacataagcgataaggtcgtccgagacttcttcgtgaacgataatgatccttgcctccacccagatccactcttcgtctgtcttacatccgcacgtctcaggcagcgtccattttgcagactcttccagatatttgcgggatatccggaaacggaacgcatggctgctgttttcatgctgatccaggcccatcgccgaacgttcggcgctttcccccagtaccctgatacggtcaaagggatgcacattctcacatatttcttcccggagaatgcgcgagtagttgttggacccgccgtttttgatataattggaaaaataagacagcccttctactatacagttcttccttatgttgaccgtataactcatgattgcctgcctctgaatggcggagcggaattctttctcctgctgtagttcttccgtaagaacattgttcttttgagccgcccgttccgcgtgacactgcagcaacgctatgagatagctgcatccgaggatcagaagatcctttaatatcaggtcgtgaaatatcggcaccgtgatcttcttcgatatactgtcactgaagagaaccggcaccgtgatggcggaggcggtgatcagcacgacacttccgaacgccatataagaaaacagcatcatgctcttttccctggagtgcatcaccgaagacatctctttggcaggcatgaaccttgcaagcagaagaagtatgactgccgccgcaagcaacgccatcgtaaatatcccgatccggtactccgccgaataaggagaacatacatccctgtagctccaaagccccatcgccgccaccgccaggtcatgtaccgcgctgaagttcagaagaaaagcggacagtataaacagataggcccataagctgtcattagacacaagcctcagttccagcactgtgacgatcggtacaaacgccatcatcagatagggcgtcggcctgtccacagccagttccgcaagcacggcgatgcttccgttaaaaacccccgccagcagcgccggccagagagaagtgcgaaactcagccagcagctttctgacccagtaaaaacttgcaaacgtaaatacaaccgaagccaaaaacaagatacccgggctggatataaaaagatttaaaaccgaatgaaagtctttcataactgacacctcctgtactctcagacatggatccaataataataaaaagcctcagaatcagcagttccaaggcaaatcaaaactttccggacgttcagacactgtgccggtctgagctgagaatactttttattttttgtatctgttcctggtccgctaccgcctcctggttggctatcgcagcttccgccagttcttttctgaggatcttcacatcttttggcgcttcgatcgcaagtctgacagtatccgccccgatgtcaacgacagagatctgaatatcatctcccaataaaagggattcaccttttttgcgctgtaagacaagcatattcagacctcctctttctccaggtctttaagagcatgacggaaatgatatttctccgactccagtatgacctgtactgcttttctgctgaccgtgttgacgacgataggacatttgaaattaacagtgctctcctccggcctgcttccaaccacgcatatgacataataagacaagtccgtctctttgtctgcctcaagcttctcgtatatctcttccgtaagcctgggcgcatagtccttcatcagcataaaaggattcataataacaaaggacaggctctcgtcctccacactcagcagattcagcacagcatcgctgtcttccgttatgggaagcggaagaaagcacttatagctttcaaacccgaacagaccatcctcaaaccggatgagttccgcttcctcatagggacagcaattttctttatcttctttcatatatctccccccgctcttgtccgcctatactctgacatccactacttctcccgtaaaatgagcggctgcgctcggcggaacatatataggatctcccatatattcgatctctacatccggatactgggatatggccagttcgatcgttcccgggataaatctcacgtcgcctttgtctatcttcaggtcaaagttcagcttatccatctcatatctgatagaaagcgatggcgcctcccagctgatatcgggtccggccgtcggaataaatcccatctggaactctcccgccggcgccgccgctctctgttcaaagatcgactgcagcgcctcgccgccttcccctatctttgtcttcagcaatatctgcccctcctttgcgaactgagcagtggcctgatacgccgcctgatgccctttctgcgccgcctgggttatagatgtctttgtagtagggacaacagaatttctcgcttcgtatgtatccagatgcagccggatcggtctgctcctgatattcataccgccttcactgcggctgatctccagttccgcagttccgtttctgcgctccatccttgcgtcattgatcttcaactcatactcgatcggtatcgtcgtaattttaagtaattgatccattaactatcacctcactataaaatcagtatacatgttacttcataaaatccagcagagaattcgacaaaagactcgttccgatcttgagcgcgacattatacacgtactgagcataagaaaagttcatcagagcctctgcctcgttaatatttaccgtactgtcaaactgggtcgttatattaagcttctcattctccagccgatcctttgtggacgaaagaagcgacgtcttcgttccgatctctgtcagacaattctgcagatcgcccgcccccttgtcaaactgtgtccagagcttcttgtaagctgcttcgtcaaagttatccgcctcgagcacatccgccatctgtcccatgagcacgattatattgttgctcatcccgtcatcactttgcccgaatcccaccgcctttattccggggaacgcggcgtcaaacgcactggacgacacgatctctccgccgccgtcaaaggtaagtccgaaaccaaggtctatatacgaatgttcccgggcgagcgccttgagcgcgtcggtattggccgggtcatttacatcgagcccccggtatgtgaccgtaccgtcctcttttaactcaaacggcgcgttctgtccgtcagagccggccatcgcaaatgtatcaccatactttgtattcaaagcatagaccatagacttctgcatctcgcggaacgttgcggcatacgtatcccgcacactcgcgttcgtgccggagaacgcctccaccccatagttcttgtttacttccttggcgatcttgccaagctgcattagaacatcctcctgggtatcctgccacttcatcgtatcctctaccgcatttctgtaatcgccgtttctggcatatctgttctcaaggatcgtggccttggcggctgcggaaggatcttcgtatgatttgctgaaccgccttccggtctctgcctgcctgcgggcctgctccagtccgctcaaggtggaattcagattgttctgataatttcttcttatcatattcgtcgttatccgcatcatcctgcctccttctatcttcctactaccccggtgtcattgataagcttgtccagcatctcgtccattgttgtcatcagcctggatgcggcattataagactggtggtaacgcatcaggtccatgacttcctcatccatattcactcctgagaccgcgtctcttgaatctgatatctgattcagcaccgtcagatggttcttcagaatggatgccgatgctttccgctcgatcgcctgtacattctgtatattgtcataacagttctggatcgtgcctgtaaataccgtgacgtctgcgccatcaggcctttttactgtgaagatctgtttgtccgagatcagcgcgtttatcataagctggacgttcttatactctgtggacgggcccgtaccgccgacggcgccgtcagacttcttgatcgacacggtcccgttcatccagccttccgacaccttgatgttggacgccgtgaaaggctggtcagctccgcttccgtcacttttttcgaacagcgcgtccccgttcaggtcattcatcactgtggccagtttgttcacaaaagcgtcaaacattcctctgtagtatccgatccccttcgtgtccgtgccgtcgaagatctctgctttattcagcatatctatattgcctttgagcactccgttctggataagatctgtgatatctgacgctccccctcccgggttgagcgcgtctgtgacttccagcgacactgggatccctcccgtaccgtcaaaatggaactctccgatcttcgtatccgatatgagcgtatgctttgtacccgcgctgtctctgaacgtgacatccagcagatctatcggctctccgcctgacgtgtccgtcctgtacgaaacctctatcggcaggtatgtggccagatcgtccagcagcttattgcgctcatcctgaagctccagcgccggattcccgagtatctgactgtttttgatctcttcattcagattctttatctcattgaggcacgtgttgatgttcgggatgacagagtccgtcatctttttgatcatctcttcctccagagcatccactgcgtttgccttttcatggatcgcattgatgagcacctcaaaagacgagcgcacgagtgcgtccgtactgcttgctcctccatcctgcggattcgccatatttttaagctgtgtgataacattgttgaacgcttcgcggacagctgcgctgtctgtctcatcgaagatctctccaagtctttccagtatctgatcttcagcatctgcggttcctacctttgcgatctggttcctgtactggatatccagaaacggatccctgatctggctgatgcctttcatcattacgccctgtcctactttattgtcatataccgagctgctgaagctggctcccaccggcgaaatacttgccagatccaggcgctgcctcgtgtatcccggtgtatttatattcgatagattctgaccggcaacatcgattgcccgctggtttgcactcagtgcctgctgtgccatcgtaaaaccggcaaatgtggaacgtatcatcctgctgtcctcctttgtactctaaacacttcggtccgtcatatgcttttcctctgtctgctcttttccgctgttttcatataaccggccttctcttcgctggatctctctgtcaagccggcggatattcacttctattatccgggccgcgtcttcactgacttcctggaacatctgtatctcccggctcagagaatcaaacagtccgaggaatctttcccggtctgcgccggatatatgttccagtatttcctgaaaacgcatacctccaaagccgagctcttcctgctttttttctcttgcctgctccaatcccttaagccgcattacaagcgactgctcttttgtcatgcactcttccaccgcagatacctgatccgtcctcccggcattcagtttaatgctttccagggcggtcagttcccggaataacacgatcagatcctctatgatctttgcaaactcattcatcagcgccttctcccttctgcagaaggattctggaagccagcgcatctgcgtctactttatatcgtccttctgaaacggctttttccagcgcttcgatcttttctgaaggtgttgtctgcattatctgagacattgtcttttgcgacagctcctctgtgatcttcttttcctcgatctgccggctgttggcagtaatcagtatctcgtcaaattttctttcacctttctcattttgtaccgcccggttttccgaagccgcctgagaaagtttatttatataacggtttgacagattattgccgtctattgaaatactcatgttcactgcccctttcatatcataatgtacctctgtatatttagattatcgtcaatccggtatgaatattaagtttttcttttcaatttttgcacctgttttgccaatttaaaccgtacatcctccgcaagcccaaagcttttgcggcggaaattccttatttttttctccagatgatctttccttggtcctatcacactgcggaccgcctctgccttcggatcccagaacgcctcccatgcccgccgcgctcttctatttctctccgccactgtgacataagcctgacgtccccccatcctcgcaagcctcagcagccagcagaccggaagaagccatgccgccctgtgcaggtacggaaacatcgtattcatatagtccatatggggaaacgcccagtccagcatctgttctctgcgcttgcgtttcagatcctttctgtaaaaatccgccacctcttttacgagcggcagtaaagtggcgctgatctttctgccctgcattccttttgtcagaatatatttttccatggcgtcaaacactgcgtcgttttccgggaaaagcattcccccaaaccagtacgcggcaagctgtatgaggtatacgtggaattccacaagcttaagatactccagctctttatttatcactttccagtccagatctctgtagactttcagataatagagccacagatccgccatatcccgtatgtccaggctgcctctcgcatactgttccgcagagcagcctatgatatggatataatactcttccggcagaaaggtgtgtatatacttatggcctctttctttctcgtagcttttgaccggcaccgcaaaatatttctgcattttccggtttgtgaaaggaagctccgtccttatgatgatcaatacgccggggatcttatagtaccattcttccccttccgttctggattccttcttctcatagtcaagatacgccagcgcctctccaagcttctcctctttccctttttccaccagaaggctgacacatttaagtcctctcatatcctgctggggatagaaggcgcgcatccggtactcctggagtacggccgcgtgtatcttccgggcttccagctcgttaagaagctcgggcactgcagaggaataacgctcttctgccagcaccgcctggtggaaccgctcctcgaacttaggcttccacggtgcaagcttttccccttccatgccgaggaccgcatagtataccatattcgccacaccgtgataatccgacagtttatacaggctcccccactccggctgtttattccactttggcagttcctctccgctgattatcgtttccagcatctgcagaaggcatttcacttcataatttcttattcttttctcgttcatgcactatccttttctcctcaaatatatccattctcttcaaatcatagatggcatttctttcatctgcggctacagctcccgccacaagtgttatgacccttttcttcatgacggagacgagctccctcgcatgacttgccacgatcatcgtcacaccgagcctgttcagctcgtccaacaggcacatcatatcccaggcggcccccgggcttaagttggccgtcggctcgtccactaccatgatcttcggattcattacgatagctctggcaagcagcgcccttgcggcctcccccaccgacagctcccctggacgggcaagcgaccggtgggcgatgcctaccgtggaaagcgtctgttccacccgctttttgatcagatgcctcggctgctcggtcgcgtacatcgcaaggctgatattctgatacacgttcctgtcattgagaagccccagctctgcctccatgatcccgaactgcctccggtaatatgggagctggttactcgtcagacggcctgtctcgcatcctccgacccatatctcccctgatgtcgggaacagctgcgcgctcagaagcttgagcagggtgctcttacccgagccgcttctgcctacgataaatacaaactctccgtgttcgatctcaaaggaagcatcctccagtccgatcgtgtcttgtccgaatatttttgtcacatgattaaactttatttccttctgcatttcttattttttcctcattctcttccgatatatatggtatatcaaacgtgaaaggaggtccggcatgaaaagatgtttccacgttctatgtgcatgctgcgctgctgccgtatgcagtctgcccctttctgcttcaggctgttttgcggctgtccagacgccccccgcaggttcgtcgccggccctggaagcggaaccgggcagcggcgagcttcctccggaagcgtccggcggcggatacagcatcccggtcactgtatacagccaggcagatccgtcctggagcagctatctgtacggaggacgtgaccctatggcgtcttacgggtgcggtccgaccgctctcgcgatcgctgtcgcttccttaacaggccagaatatcacgcctgccgacacagctgcctggtcgtatgtcaacggatattattcccccggaagaggctctgtccatgcactcattccacggggggctgaaggctacggactgaaagcagagaagctcacgtctctgactccggattcttttcgcatggccttgtctgcagacaagcttctcatactgctcatggggcccggagactttacggactccggacatttcatcgtcgcctacggttatgacgacagcggaaatatattgatcgcggatcctgccagtcaggagcgttcctcctcggcatggcccgcggatacacttataacccagctctcccgttcagcccgggacggtggtccggtctgggtactttccaaaccatagaaaaatcctttgaagcaatacatatccgtattactccaaaggttttcttattgcttataataggaatcctctccggcgagacgcgtacttgtcacccggtcggtctctaccgtctgctgccatatatttattgtcttttccacaatgttccatgcttctttccatgatccggaatccggaagttcctcttctttcatccttccaccgataagatcagagagcctttcagcgtcctctccccgcgcgcctgcaatatatagactcatatgccggtcgctctccgccgcagcctccagctctttcccgcgcatctcaagcaccatttcggccgtcactttgtcgtctcttgagagcccgtccgcaagttccttcgtcagacggcatatctcatccatatgcctgtactttatcctcagctctttgatgatctccgtcaggagaccttccatatacgcgccgctcatactgccttctccgcctccgcaaatgtattcctcagttctttgacaagcggctgcagctcctgtatgatctcctttttccttccagcctgaagtctgctcagttcatacagaaagaaatcatagaggctggacagctccctgctcagcgtatattcatagttcagtgtatctttcagatactgtacaatttccaccgagcggcctgcggactgttcaaacaacacataattttccgtgtccagagcgagctccgcccttttaagcctcttcagcagttcatcgtagagcactagcagaagctccccttttgtcattgtcataactgactgctctttatactgccggtaaccattttcattcatatgcctgactcactttctttcctactgcgcaaacatggaattaagataactgctctgggagttcatctgggatatgagcgtctccagcgatgtaaactgggaaatatacctgtcctgctccgtcttaagcttatccgcgagccggtctatgtaatcgtcgatgtcgtcgatctttttctgcagtccgttcttcagtacggtagtcggtgcatagacagagcctgcccgctctaccaggattccctttgtagcccctgtcatggatgcataacggtccatgatcgtcttcatattggtcataagaccgccctggctgactgtcccgtcctctctcttttcgggctctttggaaaatgcctcccggactgcatccgggttctcaccaagggccgccttaaatgcctcttcatcaaatacgatcttgccattgtccgcatagttcgtggatactgtgatccccatcttttcaaactgagagcgcatctccgacggtatgatgaaccggagcccgtctgcaaacgcgctcacatcagtatcgttgaacaaaagtcccttctttgcctctgtctcccacttttcgatctggctttcgctcagctcatcccgctgttcgtccgtcagaggcttataattacggtttggcttctggcttgcctcgctgttgatcagcttcacgatctcgttgtaggcctccaccatttcctttactacctttgccgtattttccacgtcgacctgtgcgtcaaacgtgacggcctccgtatcgcttatgtgattgccggaactgtcatacccgaacgtgccttttaaggttatgttcagcccgtcgatcgtcatactgttgcttccccgggtgatctccatctcttcgccggatccggcatattttacgagaatgaccgcgtctttgccatcctctgtcgtatagtcggtgccccttgtgccgaacataatgtctgcaagatttccagataagtctatctcaccgctggccccctgttccgtggactgtacgacaaaccggtccgcgttggactggtacgttatcttgatacccagctcttttgtctcatttactttatttatgatctcactgacggaactgttccaatccaatccatagtccctcagatctatctctgttcccccggcatttttgatcgtcatgcctcttcccggatccactgcgccgccccgcacaagtcctgaatccgcaagacttgcggaaaggttcagccggttggattctccgccctgaacgccgaagacactgtgattgccgagaattcctctgtcggcggcggtcatggataatacggaactattgtcatcattatcaactccgcctcccggaagtgtcgtcttgaacgtcagatgtgactttaaactgtcaccggcatccgccgcaaggccgacctcgatcctgcccctgccgaacgcctcgttcagcttggactgcaggtcgtttttgacgtcatctaacgtgctcgcgtcgtcatactcatccagttcgatccatttgatcgacccattataggaaaagcttatctgctttccgctcagctgttttgccagagacatggtctgtgtgacctgcgcgtcttccaccgcctccaggccgtctgctgtgatgactgttcttgcgtcctgcagaagttcaaatcgttctcccgcggccataaatcccaggtctgtcagcaagtctccggtggagcctgcaagcttaagctcattgccggatgtatccttactgatgaagctcatcctgcctgcattctcttttacttccatcacatccccgagtgtcttcccgtttcctatggagatgttggacagcagcttattcatagactccgctgtcttttccggcgtgctgtagtcatattccgcacctctgttcaaagtcactgaatacatcttcgtcccatattttatgaacagtgattctcctgatatcacgtctgcttccgtctcgacagaaaggtcgttgcttatccctccggtctgcatgatctgatttgacacggcgtttgacgaagtcatctttgcgtcctgcgcaaggctctttaccccgagtatggagatcgtgtccgcagatacactgcttccggatacagacaagtagctgctgttagccccgagcgccgtcacctggttcctggagaaaagcttgcttccgagcaggttggacgacgatgagtacgacgtatatgtattgctgaactcgtacactttgcctgtgatattgcggatcgcttcctgcatccactgatacgtctgctttttctgcttctgtgccgcgatcttgctccgtgtcgcataagtcatattttcaatcaatgtgtcccggtccagtccgctggccagccctccgtagccgcgcaggctggacgtactgttaaggctcgtacttcctaatccgctgatagatgccatatcaccactcctcacaaaaaatatctgtctgttacattataatattatttatcggcacacctgccgcgatagttaagtatacccgcctatttcctggaatgatggggcacatcgcctacctgtatacatgccttagtgatctccaccgttatctggcccgcatactttttcgtataaaagttcataagcggggagatagcctccttgctcaccaccacatattttggcgtaagctgcgtgagcgcaagcgccgacgtatccgcaatgcagcgcggacaggtgcagacgccgaactgctccatatactcaagcaccctgtcctggacaagggtctccatcacattcacatatgcgaagtccagatcttcccccgcttcttcctcttttttctcttccggaacttcttcctgcttctgcgcgtcttccgtttccggctgtctgttttcctgcttttcgtccttttcttcggccgctttttctgtcctgtcttcggtctgcgcttcttctttcccgtcagttcctgtctccggctcctgcgttttctccagttcttcctccagagacagtctgatcgcgtccgcaagctgttctttctccgaagacggctgcacgaccgagacagaagccatcttatccggctcgaccggaggctgcggcttcgctgctttgctgtcttctgtattactcttgtcgtttccgctggacagtaaattcaatacatgatccgtcttattcgtctttcttgccatcgtgtctgcaccctcctatgcctcgttctcgattttattcaacacttcttctatgaattcccggtaatcctttgacggattagaccggggagaatagtcaaagacactctttccatgggccggcgcttctgctgccgacacgccggtgcgtatcctggaaccaaacagctccgtcccgatctgggaagctaccgtctccgccatctcctgtacgtcctttgcaagatttgttctcctgctgaaccttgtcagcaggatgccaagtacatgaaggtccgggtttaccgagttctgaactgcttctattgtttctttcagctgtacgaggccgaccaggctcagtatttcggcagccataggtatgatgagataatctgcggccgcatagccgctgacggtcagtatgttcaaagacggcggcgtgtcaatgattatgtagtcgtaatcgtctttcacatcctccagcacctgcttgaggatcagctgtctgttctcccctttcaggatcatctcggcttcgctcagaaggatgtttgatgtcagtacatcgccatattcctcagtagagcggacagcgtcccggacacgtatctcctttttcagcacttcatacatcgtatgtccgtcctctatatccattccaaggctgaatccaagatttccctgagggtccaggtccactgaaaggactttttttcctctctcagacaggccggccgcgatggctccggaagtcgtcgtcttccccactccgcctttttgattcgttaacacgattgatactgccacagtcaattacctccaagtatgcttaatttcactttagtacagaacatcttccagatgttccctgtcgtcggaatcgtcaaagtgcatgaaccggcgttcttctcccggccgttcatattccgttgtcagtcccttccagatttcatttacttcatccacacagtcaatgtacgtctgcgcaagcagataggtcggcacgcccaggctctccgacagctttttgctctgcttccagtctgcccgctcgtaagccagcagcagactgtatatcttcccggccgttccttcctgtgccacgagcgcgtttttcacctcggcgctgaccggtatctcttccagtatctcctcttccgtcgcatttaccatatactcaagcgtagagaacatcccgatcagataggcgtctgtcttattgataggacagtcttttatatatcctacaagctctgacgcgaaggtcgcccgaaggaaggatattttaagcagttcttcagagctgctgtctgtccccttgctgtcaaagctgagcatatacacccactgcctcagctgggtgatgccgagggtgacgagcgcctggcggatggacgcggtcctccgtctcagggcaaagtacgctgaattgacaagctttaaaagcgcgtatgtcagaccggcgtcccggctcacgatctgctcgatctcctccatatcaggctcttcctccgatacggcgaccatgagctggaagaagttgccctgcatgtattttaccttgtctactttgctggccagcgtcttggctacatagtttccttccagataatccactttcagtttaacggcgtaatcatatacttctttcgtgttcactccggttgcaatgcattttttaccggtcccctgcgccatactcacgatattctcgactgattttttacctctctccgtctctgtcgtttccgcctgggagagattgatccttatgtatttggcatattccagcatctccatatatttctgtgaaaactggaaattgttgatggcaaactgataaccaagttcgcagtattttttaataaaaggcgttgcaagaggatggatgatcaggttatcctctatctgaatgatcaccttgtccggttcaaacattttcggtgtatttctaaataacagtgacggcgtaaatgtgataaacattatcttgtcactgacaaacttattgctgttattcataaggaaattagatatcatgtctgccgcagaagtctccggctcatcgtaaaaactgtcgtcgcttccctgaaacagcagttcatagcctattatgtttccggtcattgtctctttgatcgcctgtctaacaacacatctgtccattattctcttcctctctgaagcaagtggtccatgactgcaacaagatgtcctatctcgggtttggacaactgctcgtccgcaccaagttccctccccttaatctccatctccgggttgatcagtgatgaaaagataataagcggaatctttttcagcctgtcatcttcttttaccagtttcgtcaatctgtgcccgtccatctgaggcatctcaatatcagtgattataagactcactttatcgtccagcacgtcctcatttcttacctgtgacagatagttccacgcctcctgcccgttgttgaacttatggatctgggaatatcccgatttcgtcagcgcagtctctatcatacgggacagcagtacggaatcctccgcgagcacaatagaatactcacttctgttcctgcctgcaaagctttccacttcctccagctgtattccggtctccggcgctatatcggcgacaattttttcaaaatcaaggatcgttatgagttctttcccgcactgggcgattcccgttgccaggccttcctcgccgccgtttaatgtcttgtccggtttctttatgtcttcccaggaaattctctggatgcccaccaccgtatgtacccggaaggcaatatgcatctggttaaagttggtgaccatgaacaaatctttcggctgcggttctgtcgtgcgtccggtaagatagtacggaaggtcaacgaccgtgagcatgatatccctcggcttgaatatcccctccaccgcatcgtgggaatggggcaccggttttattttgtcagtcatcatgatctctctgacttttgccacatttattccatagagttcatcgtagaccgtaaactccatgatttctatttcgtttgtgcctgattccaacaagatttccgtattcgccatactttttctcctcgctttcctgtcctgtctgtttcaatagatcgggctgcgcgccctttatatattatatcggcataactccttcatctgataacggatgatcacatgacaatctcctgccgcccgaatgtacgtatggtcacttttcctgtcgccgcgtccacaagcattgttctcgcataattttccccgacttcctgtctcgtaaggcggatctgctcatttctcaagatactgcgcacactttctatatttctctgcccgatattggcaagactgctgttcccctgcacctcgaacatctttgcgccgcccgcgatcttgcagacatagcggctttttactcctccgaacacggccatccggcgcagcgtctcacggatcccggtgtcggcaaatttatacacctgcggctcggcaggatttttggactcgggaagcataatgtgcagcagggcagccagcttgatcccgggatcatagaaactgatcccgatgcaggagccaagcgcgtacgtgatcagcgtcccctcctgtcgggttatcttcatatcggcaatgccgactttcatctctctattcacctatgttcaccagcttctttaataatttattcagcgactcaatatccgggagcatcagcagactgctctcaagcttgtgatggcccagaataaagttgcctgttatcatcatgatcttgtctgtctcatatccaaattcgatcattggaacgctcaagatccctccgagcatattaatagagacagccggcaccgacaggtttatttccatgcctgaaagccctgccagagcgttgacataagaagaaatgataatatttcccacctcggtcaccgccgatacggccatctcgtccatctcggaatagtcctcgatcttacagccgagaatcgtctccgtcaccgcgttgataaagtccagcttcaggagaaagagcatgatccccttcagatctcccgacatctgcacgagaaccgcagccaccatctcctcaggctgtccgagaaagtctgccgcctcgttgaatccaagtatctccacatccgggagtgtgatcctgacgtctgtattgagcaggccggagaccgcggtggctgcattgccggtacctatgctccccacctctctcatcacgtccattcctatttctcccatatcatcatagtgtttgatttccataatatccgccttcctgtacttagcctctgagactgtttattgtctgctctatctcatctgatgactgaaccatcttgagcacataagaatacgctctcgatgactcgaccgtattagccatctcctgtgccatatccacattggacagctccagatatccttccagcagctttgcttccctgttcagcacaggggcgccgtttttggcgacagggacgaactcattgtccccggcgctctgcatcccgtctgtacttgcaaagctgtacacgcccggccggccctgaagcgttttgtcctgcactctgatcggattctgcccctcgtccagaacgagcttgttggaatccgtcaccaggtagaaaccgtccgcccttcgggaaagggaaaagtgtccattgcgcgtatagcttatttgattcgtcacaggatctctgagcataaagaagccgtcgcccgatatggcatagtcatatccgccgataccgtccccgagtcccgactgtgaaaaattggtgttcgtatggtccagcacggtccccgtgcccgacgtcagatgtgtggccacaccttctcccgccctcatgttgtaatacatcagatcctgaaatacagaactcttggctttatatccgtatgtatttacattggcgaagttattcgatatgacatttaacttatcctgctgcgtcctcgcgccgcgggacgctgtataaaacgatgtgttcattctattccctcctcactataccggtccaagctgggtaactacttttccgatgatctggtcatacatcttaagcacctgcgcgctgctctgaagcgctctctctcctgccatcatctgagtcatctcgttcaccggctctacattagaactttccagcgctttgtgcaccacatccgcgttaacttccgtcccctggccggctgaagtgtatacatccccggtcgtcttcgtcagttcttcatcataattctggaagtccacgatagaaaggcgccccaggaagttattgccgtcttcactgtacagattgccgaggcggtctgctcttatcttatctgtgccaagatagatcggtccgttctgcccgagcactctcccgactccctgcagagccagatagccattgttatcaagtgaaaaggaaccgtttctcgtatataccgtcccattcccggactggatacggaagaatccggatgtgccgatggcaaagtccagaggactttccgtcgactcataccctcctgccgcaaaatcagtatagtttctgtccgctgtcacaatgcggttcattgtaccaagctgcgcgggactgctcttatctttattcccgctgcggtagatcatctcctccttgaacgtcttacacacaaactggtctcgcttatatcccggcgttgacacgttggacatattattacttataacgttcatccgtctcgtctgcgtcagaactcctgacgtaagattataaaacccctgaaacatgatactcctccctttctatttttgttttttctgtaaagtattctcttagttttctgatagcccctgcatgtatctgggagatccgcggttcacttacgtgcaggatgcctgcgatctctttcatattcagttcttccatataatacagcgatatcacagtctgttcgttctctttcaggctgcgtatcccgtccgcgagcatgtgccggaactccttgtccatcagatgtgcctccggctgttcctcttttttgtctgacggtatctgtatgctccggtactgctctttcgtctcttccagtaccatgtcaagcgacaggaccgagaacaggcttgcctttcccatgatatctctgaatttctctatgtccatatgaagcagttccgacaattcctccgcctcaggttcccttccatgctcagaatagaacacggcagacgcctcttttatatctctgtagctctttctcaccgtgcgcggtatccagtcctgctttctcgcaatatctatgatcattccgcggatccgttttgatacataagtctcaaactttgcattcttgtccgcctcatatttgtcgatcgccttcataagcatgatgacgccctcattgacgatatcctccacctggctgaatccggcatatacattgcgcatctgcaccgcaatgctcttgacgatatacagatacctgagtgcaatttcctgcttgacctccagactccctgtcttacgatagagctcaagaagttcttcattcgtctggtccgccagattctttttccgcttctcttcctgtaccatacgcaacccctactcttttcttatatttcccactgcctgtatctgtatgttatctgctatttcattgaaagccagtacgtataccgacggatagaactgttccagcatccggtaaaggtacggacggatcacctggcttgtcaggatgaccgtatcctgggaaagttcctgaaatttcttcatctgctctcctatctgtgtaagcatgctctgcataatatccggacttaccgccagataaactccctggtcacttttggccatgctagacacaagcagtttttccaggcccgcatccagcgttacgacacgcatctgccctccctcacagaactttcttgtgatcgttctcttcagcgcggagcgtatattttctgtgacactggtgatgtcaagcccggctcccgacgcgtctgcgatcgtttccaggatactttccatatctttgatcggtattccttctttcagcaggtttatgagtattttctggagactgccgtgtgagatgatccccggcaccacctcgtccacaagctcggccgaagtctttttcacattgtccagcagcaggcttacctcctgcctgctgagcagttcatatgcatgctgccggatcgtctcggataagtgggtcagcatgacagagagcggatcgatcaccgtataaccgtatatttctgccatctctttattctcaggcagtatccatttgctcggaattccatatgcaggttcgatcgtctctatcccgtcgatctcaccggacggagacgccggttccagcgccaggtaatggtccacaagtatctctcccctggctacttcttcgccttttatcttaataatgtactggtttgtgttaagactcgagctgtctctcagcctgacggaaggaatgacaaatcccatctcctgggcatactgtctgcggaaaatgacaattctgttgatcatctttcctccgcttgattcatccacgagcgggatgaggctgtatccgaactccatctctatcggctctacaccgatcagattgtatatgttattgatatctcggtaatattcttcttccgtagcaggcgcggcagcgtccatatctgccgtctgccgggccgccgcctcttccagcacagtctgctcctgcatcttctttgagatctgatatcccgccaggaggaaaagaactgccagaagcacaagctgtatctttggcattcccggaacgagcatgaggatgagcaggaccccgccggtcatcattatcgccttcggctgggcaaggaactgtcttgatacatcctcgttcaggctgccttccgatacggccctggtcacgatcatacccgtcgatgtggatatgagaagcgcaggtatctgtgatacgagcccgtcacctaccgttgctatcgaatagacggacagcacatctgagaatgccatacctgactgcaggatccctatggcggaacctccgatcaggttgataaaggtgatgatcagcgacatcaccgcgtcacctttgacgatctttgtggcgccgtccatggcgccgtagaaatcagcttcccgctgtattttgtttcttctcgttctcgcctcctgttccgtaatgagaccggaactcagatccgcgtcgatcgccatctgcttaccgggcatggcatccagcgtaaacctggccgcaacctcagccacacgctccgcgcccttagtgatgacgataaactgcacgagcacaatgatcataaagatgatgaagccgacaatgacattaccctgcagcacgaagtcaccaaacgattttatgacctgtcccgcgcttccctggtttgttagaatattttttgttgacgatacattgatgcccaggcggaacagcgtcgttatgagcaggagagacgggaatacggaaaattccagcggctcccttatgttcatactgataagcaatataatcattgacaaagaaatatttataataatcatgacatccagtaaaaacggaggcatgggaataatcataagtaatacaataactatcactaaggcagctaccgcattgttcaaaattcgtttcatgtcttacctcatttttttattcagcttatatacatataccaggatctctgcaacagcgccgtaatactccgacggtatctcccggtttaattctgtctctgcatagagacttctcgccagcggcctgtcttctataacagccacatggttctcctcccctgttcttacgatcctgagcgccagctcatctactcctttggcaactacgaccggagcattattcttttccgtgtcataagacagcgcaaccgcaaagtgggtagggtttcttatgataacgtccgcgttcggaaccgcctgcatcattctgcttctggccctctgcttctgtatatcgcggatccttcccttgatctcaggatttccttcggtctgtttgaactcctctttcacttcctgcttggacatcttgatcttccgctcataatcccaccactggaacagataatccagaaacgcgatcacggcgaacaccatggaaacccgtaatatcatagatatgatcatatcgaacgtatacgctgccgaagcactgatgctcatatccatcgtgcggatcacattcaccgcgtcctgcttaagcagcgtatatatgatggcgacgagtacgattaccttcagcagattttttacaagctcgatggcatttttgagggcaaagattcttttgattccctgaagcggactgatacggttcagcttgggacggaaattcttagaagtaaacaaaaatctcgtctgtatcccgtgcatgacgatccccgtcaccatacagatgcaggcaaacggcagcaccgttcttgcggcggctgacaaaaattccattccatacttccccacagactgccctgagaggtccgttatacttccagccaggtttataaatcttttcataaaattcccggaagtctcatatatacccggaaagataagctttaatatatagaaggaaaggaatacaaacacgacgttgactacatccgaactctggaagatgtttccttccttccgttcatcacggcgcttttttggggtggctttttcagtttttgagtccgctgccaatatccatcacatccttctatatgtttactgtcctcaatacgtcctgcagtccctgcatcatctgagagatgatccctttcaggtagtcacccgccggagatatcaaaaataccatcatcgcaagccctatgatcactctcagctgtatgctcatgacaaacaggttgatctgcgggatgatccgcatcagaagtccggttgccacttccaccagaaattcaaatgcaatgatagggaaagcgagctttaccgccagcacgacgcattctgtgaatatctgcagcaccgcctgggcggaacctgttcccagcttaagcgccgcatagggcacgatatcctgggacgtcatcagtatcttgagcagcgccagatgaccgtcgaccgcaaaaaataagagcagataatatatctgtaagatatttcccgtcagcgcgatctgcgttccgttctgggcatcatatacggttgccatagaaaggcccatctgaaaatctatgacagagcccgcaaaagagaccaccatatcaaacagctgcatgacaaacccgagcagatatccaagcgcaaattccttcagaagaagtacggcatacacgaccgcggaagtcacttcctctcccgccggctctgcctgcggatagacgaccagcgcaagaactagcgccagcccggtcttaaagactgccggtatattttttctccccagtatcggattgagaaatacaaatccggacattctcatcaggacgagcgtaaacacgagaaattccggtgtacctgcaagtaacatatgtatgttctcctaaccttcggcaatgaaccggaatatttgctgcgtaaattcctgcagcattttcagcatactgtttccggttatcaccagaataattcctatcactatcagttttggcacaaatgtaagcgtctgttcgtggatctgcgtcgcggcctggagaatggatatcacgatccccacgatcatactgataagtaatatggggcccccaagcttcacggccagtatgaacatctgatacatcaaatcgccaatttcacctgttgtcatcttctaattctcccgtcagtagttaaagctttgtacgatagatgagaacagcagctcccatccgttaagtgtcacgaacagcagcagcttaaacggcagtgcgatggtcgccggcggaagcatgatcatacccattgacataagcgtgctcgacacaatgatatctatgagcaggaacggtatgaacaaaagcagtcccgccataaatcctcttttgagttcactcgtcataaaggatgggatgaccacccgcatcggaaggtcttccggcgctgtcttctcctcgatccccgccatatccacatacaggttcagcgtgctcacctctgtctgtttgagcatgaattttttcatcggcacggttgcccggtccagcgcttcctcctgtgcgatctctccgtttttgtacggctcataggcctctgtattgatatcttttatcacggggtccataatgaacagtgtgagaaataatgcaattccgacaagaaccatatttggcggcgtctgctgcactccgatcgcgttcctcgtaaaagaaaggatgatgatgatcctgacaaaagaagtcatcatcacaacaatggaaggcagaagcatcacaaccgtcatcattacaagtatctctaacgtcggcacctgacctccgttgatgttaactaatgcccctgtattcattcacttcgcttccttttcccaattttctccatcaccgatctgaagtctgtaaactccgtaccctggccggcaggactttctatctcctcaagttcttcttccccgagctctttgagcaccgtgatctgcgctgcggtgatcccgagaagcagatatcctctgccggtctgaacgaccgcgatcgtcctgtcctggccggccccgatctggtccaccatccggatatatctggaagaacctttcatctttcctgtctttgcgacatattttgaacacacgtaggccagataaagtatgagcactacgatcagaagcgtaccggcggctgtaaaaaatccattcagcataacttacacacccctactgtgccagcggtatttcatccgccagtatttccgtgatcctgatcccaaagttgtcatccaccacgactacatcgccctgggcaatacactgtccgtttacgaacaggtccacctgctctcccgccagcttatccagcacgacaagagatcccttgttgagctcaagcacatccttcacaagcttcttcgtccttcctatctcaacggatacctccagcggaactcccatgatcagctccagattggactcctgaagttccgtctcctccgcgctctgttccaggttcggctgtgacacaggattgacttttattttcttcggtcccgcagcctgtgtctgcttcatctgctgaagctgcacctgctgcatctcaagctgctgtctcataagatccatcatctgtgtcatggaattcataaactgcggatcggcagccgccacagttcctgccggctgtacggcgctcaccggaggcgctgcctgtaccgccggattggccgccggaggcgttgcctgaggcataaccggtatgtctgccggcgcttctgtatcctgcatcagaccggcctgaggcgcaggttctgaaacagcggcgccggcaaaaggcgcggcagcttccggagccggtacagtcccggctgccgcaggcgccggcgcggcttccggtccggcctccggcgccgccgcggccggttctgccgggactggttccgatacggcggcggccgtcactgtctcttcctccggaagaaccgccgtctcctcctttggaagctccggtgtaccatcagaaaagaagcctgccacaagctccctggcaagcccgataggcatcaggttcatgaactcgctttccatcttatctgcgatacgaagtgtaaagccgatcaccaccatcgggctttcttctgtaaaatacttttccttgaactgttccgggctctctatatcaaaagacaccggtgtcgatatatttaccgccttgccgagaagctctgaaagtgcagtcgccgacgcgcccatcatctgattcatcacttcgcagatggcgcttatgttcatctcatccagctcaaattcttcctcgggaatctccattcccataagcatctcgacaataacgcgcacgtcatttctctttagcagcatgatattgctgcctgtcagcccttcgatatatatgatctctacccctacggcaggttccagattaccgaattcaaattcttctttgtttctgacctgtacgattggcgtcgttatgtctactctcgcatccagcattgtagaaatggctgttgcagatgccccgagacttatgttaaggatctcgcctatagcgtcaatttccatcgtactcagtttctttacgtccatttttaactctctttccggcaaacgttaagcctttctatttcccaatttccatggctttctgcgccattaatttcaccgcgttaaaagcagtaatgttcgcttcataagatctggtagccgccatcgcatctgttgtctctttaatcatgtccacattgggcatcctaacgtatccgttttcatccgcatccggatgttccgggtcaagtacagccttcagttctgtatcgtcatctataattgcagccgcggccactccgccccggttcgcactgttctgcccgctcatggcccttcccagtaccgagcggaagttttccttcctggactcaagcactaccatttttctccggtaaggcgtcccgtcctccgtcctggtcgtctcaatattggcaatattttcagacgcaatgtcaagcctcagtctctgcgccgtcatacctgaagcgctgatattcaaagaactcaaaaaagacatatgtgtctcccccttcttaataaactagtcgatgatcttcgataccgtatccaggatcctgtttgccttgaacggtttgactatgaaatctttcgcgccggatttgatcgcctcaattaccatcgtctcctgccccatcgctgagcacatgaccacggtcgcgcctggatcaaaggccttgatcgctttcagtgcttccagcccgtccatattcggcatcgtgatatccatcagtaccagtgccggtttttcatccttgtacatctgcagcgcctctgctccgtcggacgcttcgcagatatcggtgtaacctcccttggacaaggtgtccttcaccatcatcctcataaatgccgcatcgtctaccaccatgatttttgccattattttttacctctttcctcaataatcgttagtattttttatattgacacggcagattatttatctgccggtgcttcctcctgtatgcactgctttatcttaaccgcagcatttttgttgtgcgcgccgagctttcctctaaaccacggctgttcttccacatataagacaacatctgattccctggacttgttcaggtcaatgacatcccctactttcagaccgcacacctctttcatgctgagctgtgcctcggcaagttcagcctttatttccatcgtgctccggttcagccgtgtcataataagctccctgctgttggcaatgccctcgtcatacaggccgtccacatgcttgcgcttgtcaatgatattgaatatattcatcagcagatttcccggaatacatatggtgatccgtccgtctatattctgcatcttgacattcagcagcacgatcgcgaccggctcatccaggctgatctcctggaacagtccgggattctcctcaagccgctggtctccgagatttattttgatataattgccccaggcgtcccttgtgatatcaagcagatatttcattaccttcttgtagagcgcgctttcgatctccgaatatgtataggatgaatccacgtcgtcgtcatcccctgttcccccaagcatacggtctatcatattcaccataagtttctggcttatatggatcatcatgggcggatttttggactcatcgggcagctttaagttcagcatcatcatgacgtcattttcgctcagtatattactgaattcaaagtacctctgctcctccacagacaggacttccatctcgcaggctgttctgagaacaccatttaatctggaagacgcaagtctgccgtagttatcataaatgcccttcaaaagcttcagcttatcttttgtaaacttctttggactcttgaaatcatattttttccaattcttttccggtttctcctctttgggctcttccgctgcgtcactgttcatcatagaattaagcaacgcatcaatctgactttgtgataatacttctgccatagccacactcctgttgtttatttccccggtcttgtatgttaattcccctcgtttttatagacctggctgtaatattcatccagcgtctgttccacagaccctgtctttgtgatcaggatctccactcttcggttcctggccctgccttcgaacgtatcaaacgtgtcgatcgggcggaactgtccgtatcctgcgcttaccagtttcttcggctcaatgatgttcttctgctgcacataggcaactacgaccgcagagcgcgtggccgacaatacccggtctgtcatgacctcgtttggtatattcggctctgcctgtgacgtgtggccaagcacctggatctcctttatcgcatctgaagcaggcgcaagaacagaggaaaatgtatccagaaccgactttccctcatccctgagaacataactgtcgccgtcaaaaaacacattgtctttaaaagtaatgaactgatatccgtcgcctttggcaatctgtatatctgccacctcaccggacgcatcctgcatcttcagaagattgtcatacatctcgtcaaatttctggtcgatctctgttgtattggcacccggtacattctccgtgccctctttttccatcgtatctgtgacgatctgcgacggctcggccgcctccgggttcatactctttaccaggttctcccacttcacctggtcaacggaagatatagagtacaacaatacaaaaaagcaaagcagcaatgtcaccatatcgccgtaagttcccatccagtcggagccttcctccggacttttctgcctgcgtttcattgtatccacactcccttctacttctttttcttttctttcttcggcttcttgcctttaccttcttcaccgtccatgatcttagcctgcttctgctggtgcagcagtgatacaagcttctctttcagattctttggattctcccctgactgtatcccgataacgccctcgataatgatctgcttgtacaggatctcctcctcattccttatgcgcagcttctttgcaatcggcataaacataaggttggccatgatacagccgtaaaatgtcgtgaccagcgcggtcgccatactctcaccgagtgtagatgaagaaccctgggacaggtccatgctcttcagcatgtttataagtcctacaagtgttccgatcataccaaaggcaggggcgtaacctgctgctttttcatatatcgcgatctcctcctcgtgccgctggctcatgctgtcgacctccgtctccagcatctccctcaccttatcggcctccatggcatcgacaacgagcatgatgccctgcttgaaaaacgggtcgtccagctgatttgctttctcctccagcgcaagaagcccgttctttctcgccagctgcgcgaattccaccagcatgtctatcacaggttccacctggaatttcttgttggacagcagcttcgtaaagtgcttgccgacgttcttcagcatattaaacgggaagctggctatcacggcacagagggtgcctccgacaacgatcataatacttggtccatctatgaagcttccgatcttccctccctgcatgatcgcattgacaataaaggcgaatccgccgacaacgcccagcaatgtggttatatccatttctaaacctcctcattccgcggataattaatacactgattattgaagatgatgacctttttgataatgtcgtctttatcttccctcacgatatggtactttccgttcatcatgattatcttggactcgggaataagctctatgtactcgatctgacgcgagttgatcaacaccggttccccgtttagttttgttaattctatcaattctgtcccctcctgtggcagtcccgcggggaatcactccccgcggcttgctctgttaacgtttcatattgacaagctgctccagcatctcatctgtaactgtgattatttttgagttggcctggtaccctctctgtgtcgtgatcatggacgccatgtcgctggcgagctctacattggacatttcaagataattgcttaagaagtaatcgccctcaaccgccgttatctgacctgcatttggtcctgcgctgtaaagataaccggcagactgttccagaccgtttggattttcgaccgctgccagcgcaagttttccgatcgtaacctgctccttgtcaaatgtaatacctgtgatcgttccgtctgttccgatcttataagtctgtatcttgtactgctctcctgcggcatttactggtatctgcagcggctttaaaacatctgtattcaacgtgccgtctgtattttgtgtaaaaccgtatacatagttgcggccgtcatctatgagatatccgttattgtctacggagaagatacctactctggacagagacagaccgctcgttgcaaagttatttgaagctattccagctgtcggatctgcgatcatcgggccgacaataaaaaatccgttgccgtttatcatacagttcagcggatcccctgtgaatccccagcttcctgtcgagaaattcgttgttattgacccgacattgacaccataaccaagctgggaactgttctgtcctcccgttccccctgcgttagcattgcccgcggtactgttgatcacgttctgatacatggcatcctggaaatttgccgacctggatttatatccccaggtatttacgtttgcgatattattactgatcacgtccatttttgattgatgcgaccgcaggcctgcgatcgcggcatacattgatttgaccatttcttttgtacttcctctcttctgttttctctgccatacgcgcctctgtcattcggacataaggccaagcctccgtaatggtccggctatagcagtacggcactgtcaatattggtaaatatattattcttcatctcctgcgcgttcattgtagtgattaccgtattgttcgtaacgtttacgataaacgcgctgctgcttccgatcacgactacgtccttcgctcccttgtcccgcgccttatccaccgcctctttcagatcaacggcaagctttgatgtcagctcgacgccgcgctcactcatgcgcatggcggcatgtttggaaaactgaagacccgtcctctgtatctctttatcatacagagcgccaaagtcagctttttcctccttctgccggtaaccttcatgctgaagacgcagttcccggaccgtggaaagattacgtatttccatcgccttctccattgtctcctccgtcttctattgccgagtcaggtacttcccctaccgtcatgatctgggacagcgaatactcttttccgtctatgtacagactcgggttatttcccataagaatcccgctgactgtaccggtcgtcgtctctccggtaaatttcccgtcctcatccacctctgccatagtcactgtttttcctaccatggaagaagcataagatatcgtattgatcgcatacatctccagattaatggcggacatctccgtgatcgcctggatcatctgtgtctgtaccatctgcgccatcatctcgcttgtatccatcgggttgtctgcatcctggtatctgagctgcgcggaaagaagcttatagaagtcattaatggtcagctcgtttgaacctttcgatgacgacgtccccgctgaattgcccgcagaactcgcccttgcggctgccgcattattataattggccaaaatatttcctaatgtgttcatatctcttcctctctctaagccagtcccagcctcagctgctgcagaaaatcaaagttctcgtgaaactctcccttatgcttttctctctgctgccggtccggttctctgccctgtccctggtcattctgctcctgctggagataatcctctgcgggtctttcaacgatcacttccgtctcattgcctgtcctcgcttccatgatcccggccagttcttttgcctgctgtgacatggcctgcattgtcctggcctcactgcacacaatagatataacggtctttcccgcctcataggctgccttgatcacaagcgtaccgagattgtccggatggagttgaacctcgaactgctgttttcctgatacgatctgctttacaatatctgttttcagcatgtccatgtactctgcgcgtatgtcttctgcatgcaccgtcttgtgtgccgccggaacatctctgaccaccggaatgtgctctgctgctctgtctcccgcctccggactcttcactgccgccgcgtttatcttggcgtcgtctctttcctcacgcataccgcctgttccgcctgctcctgcctcgtcttccctgagctttatctgctgcggctctgcgggtatctcacgctcctgcggcattcgcgaaaatgtatcctttatggtctcagtctgttccccgggcatctccctgacggaaaattcctttgtagttccttccctgccggctaaagcatccgcatgtttttcaggcgccttaatatccggtctgtccgccggaatgtctgtaatgtcctgaagctccggtaaagacgccggcttttctgccgtgacgtacgcattttcttccagaaccgggactgttacgtacatttcactcatgatctgcgctgcattttctgcatttggcacagccggtatctctgcgccggcaggagaggctgtctcttctttaacgtccgtctcctgtttctcttccttctttgccgtatactgctctttttgtcctttcaagacctcgtcgaacctgagctgcttttcatcgcgcagacttttgtccttccgtccgctgttgactgccatgccggttcccggcacttctgccacgatcgtgttcatcttcatcaccctcctttcttttgtaatatttatagtaaaactgctatgcagctactatcccattcttgcggcggcagaagacgtattggcaacgaattcctccacgaatatttcctccgcctttctctcagccgcattgtattctttttttctcttatctttcagcctgtctatggaagaagcctctgtctttgcggcgataacttccactctctttttttcttcctccgctttcagcctgtctatgatcttctctgtcttctggatcttccagagcacgctctcaagatagccttcatatatcttcatctggcgtatcgtgcttcccctgttcttctcttcctcatatctcatgcggcagactgcgtgctcttcctccagcatttgaagccgctcctcttctcttgcgaccttctgcacgatctgggcatattccgcccgcaggttatgctcgatctgttccttatatgtcagtaccttgtccagtgaaaaagcaaattttttcatctgaatccctccacagccggactccgggaatgatttattgatcaaccagtatttttctcataacatccagcatttcgtctttttcgtattttctatcgatctcctgcatgagaaaccggttcacctgttctattttagagatcgcgtgatcgagcttctcgtttgttcctgatttgtaagcgcctatggagatcagatcttcattctgttcatacacgctcagaatgtctcgcagctttgacgccagttcccggtgctcctccgttacaatgtccgtcatcagacgggaaatgcttgcgcttacgtcgattgccggaaaatgatttgcatttgcaagctttcggcttaacacgatatgaccgtccagaatacctctcaccgtgtccgccaccggctcattcgtgtcgtcaccctccaccagaacggtgtacaccccggtgatggaaccattttcaaacttgccgcttctctcgagaagcttcggaaactccgcatagatggacggcgtatatcccctcgcgaccgggggctctcctgtggcgagcccgatctctctctgggccatggcaaaccgggtcagtgaatccatcatgagcaggacgtcctttccctggtctttgaagtattccgcgatcgttgtcgccacgatcggacatttcatcctgagcatcgccggctggtccgatgtggctacgacaaggactgagcgtttcattccttcgggaccgagatccttttctacaaattctctgacttcccttccacgctctccgacaagcgcgatcacattgatatccgtctctacatttctggcgatcattccaagcagcgtactctttccgacaccgctccccgcgaagatcccgatcctctgcccttttccgatcgtgttcagcccgtcgatcgccttcacgccgaagtgcagctcctctgatataggcggcctcgacagcggattgatcttgggactttccacatagtagtaccgctcggattcaaacgggcctttgtcatctatcgggttgccgagggcatctatgatccttcctctcagaaattggccgaccggtatcttcagccgcttcttcgtgcttctcacgaagctgtctgtccctatgcccggcatgttttcgtatgccataagctgtatcttttctccccggaagccgaccacctctgccggtatctgttttttctgctcttcgttatagatgagcacgatgtccccgatattggcgctccccccggatgcctccatggacatgccggttatgttctctatctttccaatatggttgatcgtctccgctttcatgatcattcccggaaggtctttcagcatctctttcactccagtctcggctatagtctagcgttattcagtatttcctttatgttctcaagctgggtcccaacacttatgtctatgatctcgtcaggaagctccacgatgcacgtgcctttttcttcctcgtccatcatgatgacctttacactgtccgccatcttggacagactgcgcaggaactcggcatctccctgaatatctagcgtctctctgccgcttcctatgtatactttggcccaggccgccttcttaagcttctccgtcgctgccagtatcatccgctcgactacgtcctcactcgtgcgaaggctcgtctgaacgatcttttcaccgatcgagagcgcaatattcttcagatcgtcgatatatttttccaggagcttgtccttttcctcccccacctctttcacatagcgggcgatccgctcctgcagctgcgccatctcttcctcaaaacggaggcggttttcctccagagccttccggatgccttctttatagccttcctcttccccctgggcaaatgcctcctgccaggcatcttcctttatcttatccgcgcctttcctggcggcgtccagtatgcgttctgcctggcgggccgcttcctccagtatgctgtcggccccggaactttccggctcctcctgcatatgatcctctgcgccttcttccggctcctcctcaagggaaagctccttatagatctcatacttcagcgccttgctgctgtcttccctctcatttttaagtaccctatacaatgatgtcatcctttccgcccttgccgatcaccagttccccttcttcatccagcttccggataatattaacgatccgctgctgcgcttcttctacatcacgcagacgcacattgaccgtaacttccaggtctgactgcaccgtctctgccatacgggtagacatgtttgagaagaacaactggagcagttcctgattcgcattcttcagcgcatagacaacatccttcatgtcacagtcacgtataaagcgctggatagagcggtcattcatcgtcaggatatcttcaaagacgaacatcttcttccggatcgcttccgccaggtccggatcatccttgcccatctcgtcaaagatatatttctcattgctcctgtccatatggttcataacgtcggcgatataatcaatacctccgatcgtcgtaaagtctgttgtaagtatattgtcaaacttcttcagcagctgtgtctcaactatcttgatggcatccggagaagcgctctccatcctggcgatgctctccaccaccttcaggcgcttgccctccggcagctccgctatgagagccgcggcctgcccggaatccacataggacaggatcagcgcgatcgtctgaggcctttcatgctgcagcacggagaagagatttttcgtatccatcttactgataaagtcaaaggagcggtttttcagatactttgtcatcttcttaagaagctcattcgctaccgattccccgtaagttttctccagcacggagcgcgcgtattccatgccgccgtccgtgactaccttctgcgtcaggcatgatttataaaaatcatccagtaccgcttccgtctgctctgcctccagatggccaagctttgccacctccagcgtcagcttttctacttcctcctcagtcaggtacttatatactttcgatgccttatctgcgcccagagcagctataacagccgcagccttccggcccggagacagattggctgcattattcgtctgcttttcgtccatcctgctctcctccattcagccagtttcggatcatctgtgcggatatttccggattttcatctgcaaagtctcttacattttcacgcagctccctgctcttttcattcttcaggttcagtatctcaggtttccgtatttcctctgtcacatccggaatgagtaagtcttccagttcctcctcttcttccatgcgccgttttcttcttctgcgtatgaggatcaccgcaagtatgattatcaccacggcgataacagccgcaacggcaatgaccggaagattatcctttatatttttgagtatatttgatacttctttcgtatccttatccgcgttctcttcatagaacggggcatttacgatcgttatcttctccagcctgtcggcagcggcgatacctgtcgcatttccgaccaggtctctcagttcattcatactgatatttccggcatttttaccgttgatggcaacggacactgtcagatcctcaagaactcctgtatccagttctccctgctccttcacctgatttacgaggtagtctctcgtggctgattcactggccgaaccggaagcattgttgtcagttccggcattatattccggtgtatcggcattggtctcgctgcctgcaacccctgtcccggcgcccccgccgttcacagtatcctttgtggtcgactcgctggatacgatccctgttttgtccttttcatctatcttttccggcgtcgtgtacgtcgtagattccctgatgaccttttccatgttgactttaccgcgggcagatacacgtatattttccgcgccgtaaaaagaaccaaggacattgatcactttttttgatatctgcgtctctatgagctgcgcgatctcttccgtggcattgctgccggacgcgctgctcccgtctttatttacagagacctcgatcccgttgccgtcaaacacagccacattttccatctccatctccggcacactttttgccacgaggcgctggattgctgccgcctgcttctcggacggcgactccccgctctccattgtgacaacaacagaagcactcggagttccggccttttccccgtcctcctccagaacatacttctgctcttctttcagggctatattgacttttgcgtccttcactccgtcaaaaaagcggatagtcgcgcctatccggtcctgcagatcatagagcttatacgtctctttctcagaatcggtcgtcattcctcctgaattttctgtaaacacatcataggtaaacccgctcttcggataaccctcatacacaaggtctgcccgggttttatccgcaaccttctcatctaccagaatatctccgttttctttgtactggaagtcaacgcctgactcctgcagctttccgataattttggtggcctcttcttccgtcaccccggtaaaaagcgttgtataatccttatgattcaggacgagcgcgattatgacagccgcggcaatcaccgcaaccgcggctgttccggcgattattttcgtctttttgctatatttaccaaggaaatctttcaattgacctaatttaagctttatcttatccatgtcctcgacttatgtccttttcatttaattcttataagctgattctcatcaattcgttataagattctaaggctttattcctcagctgtacgagcatatccactgccatctgcgcttccgacgcggcgatcggaacggtgtgcgcatcgtcgatctgccccgttgccagcagatactgctgctgttccagattggcctgcgtatccttgacatcttttaccgcattattaaagatatcagagaacaggctgtttccgccctgttccacattttcatttctttttaacgtcccgatagagtccattctctgaatcggggtgataaatccgttttctatcatgatccccctcctactgtcccttgatcactgttcttagccttgtgatatcactgtttacagaattgatcccgtactggtactgaagcgctgtccgcgtcagttccaccatctccgcgtccgcatttacattgtttccgtccagcctcgccgtctcccccggtgtttcattgaccacggccgacgctccggctatggcctgccttacctggcggccgtccccggcctttgtggccgcggcaagtcttctctgaaacgtctcctcaaaggtgacgtatttagatttataccccggagtatctacattcgcgatattattcgatgtgaccccctgctttgtccagagaaaatccagagacttttccatcattccgattgtgtttccgtacatactgttaatcccattcatacactcactctccataaatagactaaattcgacacgagtcgataaaaaaaattaaagctccagatatttattttcaaattcatcgaccggcataggcttatcaaacagataaccctgccctagttcacagccgaagttcttcaagatctcccgctgcgacactgtctcgatcccctctgccacagaatgcgtcagctttaactccatacacatccggagtacatattctgcaatgactcttggcttaccgccgatctccagcctgtctatcagactcttatccagctttatctcattgaaatccgccagtgacaacagcgccaggtcggaatagcgggaaccaaaatcatcaagggaaatgcggaagcctgacttctgtatatcatccagaagctctttcagtgtatcccgctccagcataccgatgctctctgtaacttcgatcgtgatctgtccgggatccaccccgaatttcctgcagaccgctctcatcttctctaccacttcatcttccatcatcgttacacgggagaagtttacggcgatcccaacatcctggcggcctttttctttccattgcttcaggatgcggcacactctctccagcacgtagaaatcaatatatctgattatttcgtctccttcgtaacggcttacaaaagaattcggaaagatgatatttccatgctcatccagtcttcttatgagcgcctcggcaccgcctatccggttatttttcagattgatctgaggctgcagatatacgacaaatctgccggtctcaatttctctctgaagattttctgccagaacgcctctgtacttctgaatacttttctgtccgacagttcctctcttataattcttcaccttgttgatatgcattttctcattggccacagtgatctgatagtcgatatcactctcaccttcaaaccagcttgaaccgatcgctatctgcagctgttcatcccatttggcgatcttctgcagcttcctgacctcttcttcaaactcactcttcctgatatccagacagaaggccacaaattcatcatcgccgacacggtacacataatctccaaaacactttacgagcgtctgtgccacatatctgagcatatggtcgccccactcatatccataggcattgttgatattcctgagactgtcgatatccactgtaacgatcccaaattcttcctgatactgctgttccagccattcaaccatctgccgggatttcttccggtttccaagtcctgtcagatcatcaatatatcctgagtttttcgcttcctgccagatctgtctttttcttatatcattgacgataaattcaggcgtcagcctgagcagtacctcgacatccgcatttaccgtcggattgtcaacccccaggaatccgatcacctccccctccagtacgaggggcatcgcgagaagactgtctacattctgagccgccagaattctgtattcctcagaatcatgatttttttccttcgacagcgatgagatattatatatctggcctttttcaaacgcctgcatccagcagtccactgcagacagcggcagctcctgcaggttgtctatctggggctttatccctttgcggcatatctcaaatgtatttcttagagactgcttttcctcggttatctcaaaaatatacgccctgtccgcatcataataatcccggatgatcgtcaggaacgcgtagatagactcatctccctccttgctctccctgtttaaggcaagcgcacagtcaacaagcaccttctgcacatccagttcctgcttcagttttctctccatatcgcagatctttgtgacatccatggcaaattccatgcgggtctttctgccgttaaaatttacaatgatgccccgctttacaaattccctcttcatatactcgttgtaaaagttccactcataaaaggattcttcgctgagcagatgatttgtacagaacgggcacggactgtttctgttctgcagtacctcatagcatggtcttccataccactcttccatctcaggatctcccaagatttcaagaccctttctgttcacaaaatacagcttgtagttctctatatcagacaaatatgtgacatcattaccttcatttacgatcaaagataatatctcattatcactaatagtcatatttttcttatcctttcgtaacattttatcccgtgttcccaaagccgctgcagcctcgtctttccctgtctgtacaaggctttgaccgctgttctttacgggcgggatcagtggcagtaaaagtagacttttacccccatggatgatattattactttgaataatcgctttaataagtagcttcttgaagaaaaaatctgaaaatcacaatttttactgtggaaacaaaagtctacaaatatttccatatatttcccaaattatcgccttttttcgaccgcaaatctgtacaattttactcaagtattgagttccaccttgtaaaaagcattcgtgatatgcttatgaatcagatgatcgtgccgatatatattaagagtgatttatcttcataagttgtatttattacaaaacgaaagaaaagggaaaaggtggtgtatcagaattggaaaaatcattccaaaaaaatacgaaaacgatccggaggaagctcgtgtcttcttttgcaattgtcactgttatcgccagtttagctggtatcctcgggatcatcgtcactaatgtcatgaattcacagtataccggcgccataaaaaattatggctttgcccagggtgacgtgggtcaggcaatgacatcgcttgcagaatcgcaggagctcctgttcgcggcgatcgcgctggatgatccgcagcgtgtgtctgaagccgaggagttaatgaataacgctttggcagaggtaaacaagtatatggatgtcgtaagacctacactaaagacggcgaaaggcaaagaatcctttgataaattcgagacagactatgccgcttacaaagaaagccttctcgatctggcagaggaaggcatcgctgctgacgaagaacatgaaagtcttgttgcggaaaagatagccgacgaaaatgacccgctgtacgaagctgtcatgacagatatgcaaaatcttatggagtcaaaagtcacaaacggcaatgaggttatcgactcgttaacgaacgcctcgatcatagcaatggtagctgctgtcgttatccttttagctgctgtcgttgtgatcatcgtaatagccgcaaggctgagacagcagatcgcaatgcctatacagcagtgcgcggaccgtctcaagctgttgtcccagggagatattaccacaccggttccggatgtcagcggtacagctgaagtgaatgagatggtggaatgctccaagatcattgtgtctgcgctgaaccagatcatcaaagacgaagaacagcttctcggcggcatgagcaatggagacttcactgtatcctccaattgcaaggacctgtatatcggtgattttgctcctcttctggaagcgatcagaggtatctgcttccgcctgaacgatacgatggaacagatcacagaagcttctgtgcaggtagacgcaggcgccgatcaggtatccagcggagcacaggcgctttcccagggggctaccgagcaggcaagctctgtacaggaactggccgctaccatcaacgacatctcaacgcagatctccgccaatgcggaaaacgcgcagaatgccaatgaactgtccaatcacgtaggttctgatatcaatgagagcaaccagcacatgagcgaaatgacagacgccatggccgcaatcggcgaggcttccaaccagatcggaaagatcatcaagacaatagaggatatcgcgttccagacaaatatcctcgcactgaacgctgctgtggaggctgcccgcgctggttctgccggcaaaggctttgcagttgtcgcagatgaagtgcgtaatctcgccggaaaaagccaggatgcggcacagaatacgactgcattgatcgaaaacgccatctcagcagtggaaaacggtactcagatagccaacacgacggccgaggccatgggcaaggtagttacaaacgcgcaggaagttgtcaatctgataaactctatatcagaagcttccaaaacgcaggctgactctgtcgctcaggtaacacagggaatcgaccagatatccagtgtagtacagaccaattccgcaacggcggaagaaagtgctgcggccagcgaagaattatccgggcaggcaagacttttgaaagacctgatgagttccttcaagatccgggggaaagacaatgcgtcaagtacggcttcctacacttccgagagtacatactcaagctatacacagccgatctccagtgataagtattaattgggaatttttgttggggaattggggttgtggtgtacggcgcaggaaaggcggcgggaagcggcggaccggtcagtgcgcttgcaatccgtaagtaaaaaagacgtggtattaacagacaccgacagatgcgccggaaaatctggatgattttccggcttagctgtctcaggaactgcgcttgatgcgcagttcctggtctgtttataccgcgtctttttttctaacggattgcaaagctccctccgacggcccgccgcttcccgccgcctttcctgcgcctgttgcatcacatgactcaaaattcttcaacgttgggaggattccctggcgggttacatggatctacgctgtggctgttataaatattaacaaagctgccgcataacggacaagttctgccctgaccgtaaacccacaggtttatccatttaggcagcccagggaaatccccggagttgagaaagtttggatttgggaaggaacaggtgaagagggcggatgcgcaggggtgcggcagggcgttcggagacggatgtgggaggcgttgctgcagaaagagccggaatcggacacggggatgttatctcaaataacatccccgagagcctctgagggaggaaatcccttcaggatttcattccgaataggctcggttgtccgattccggctctttctgcagttacggatctccatctgacgaagcgtcctgccgcacccctgcgcatccgcactcttcaccgtccactgccagaacactcaaaacttcctcaaaattccccatccacatctgagagtatggaagtgagtttcatctccatctgtatacgcatcagatctacgagatttgacaagtatccgctgtctgcctgtacggcctgcagggaaactgtttctccggattcatattgctgtgacgccgcctgggagacggtcctgtttactgttatgtcttctcctgcgtattccatcacttttttcacgtatgactgtgtctctttaaagggcgggatacctccgtacttgtccacatttccgctgccggcgttgtacgcggcaagggcaagctttacgtctccgccatatttcttcagcagatctgctatgtaggaagctcctcccatgatgttctctctcgcgtcataaggattggatactccgagcgccgccgccgttgccggcatgagctgcatgactccgatggcgcctgcctgagagaccgccgaggcattaaaggcggattctgcctttccgatggctttcagcagattcgagtctacgccgaacctggaagccgcctcctcgaatatggcattcatggatgacggaaggctgtcaaacagagtggctgtgctgtttttccgggacttggcggcaaatatctgcgaaaagcctgcgcctgcccgctgcgtgcgctccgtgctgccgtgctgtccgtaatacagatttaccggcagtccggagccgaagcttacaggatcaaaattatagttattgtaatacgccatcttctttcctctccttcttatatttttcctttgtaaaatcttcttgttatttttaaaatccgaacgtataataaattttatactataacagattttaataaatgtcaaaacagaaagggtactgttatgtttctgatagactgccacaaagcaagtatttatacgatagacaacgaatatctctgcgatgcgcacgtttcccatatagcagaccgctctgcgcttcttacttttgaagaaccgtacggcgatattctgcgctccgaagtgctcgtaaccttttatgataacgcaaagggtctcgtatcgtgcagctgccgcctttcagactataaggaatatgccgtctccccgggagtgaagcacagcagcgcgctctgttccttcggcgaggtcgtcacagccctccagcgcagaaatgatctgaaggtccgggtcgatctccccgcccgtctgtcttatacagacggcgaaggaaagacgatccggtcggacgcgtccatacgtgatatcagtgctggcggcgttttcgtcatatgttcctgcacgctttgtaccggacagcagttttccctctccttccgggccggccagaaggagcttctcttgactgcagaggtcatccgtatcgatgatgccggatatggctgccggtttccagatatgacatccagccaggaagcgtcggtccgaagctttgttttccagcaggattcacgtaacaaacggttctgatatcaggacggttcttccccgggtggatccgcttcctgtacctcaggttcctctgtctgcgtctcctgttcctgcggttcctctgattttggcttgtaattcaggaaatagatatatatgtccacgatcgcctgatacagttcttccggtatctcagatccgagatccagctgggtcagaagcgtcgccagagagttgtcttcatatactggcactccgcttttttctgccgtctctacaatcttttccgccagataccccatgcccgacgccacgatgaccggagacgcctgtttgtcctcatcatacgtcagcgcgaccgcttttttgttcagcaattcattaaattctgacattgatcgaattcttcctttcaaatattttcggaaatgcttcggagaccgggatggatctctgtccggattcgacgaacagttcctccgtctttatctcattttccgccagtatctgcgtgatatcgcggcgtatggcatcaaggctttcatccagcgcttccggacagttcatctgaagccggatattcccatcctggtaaataaagtaaaggtcaaaaaatcccacatcctgtacgtcaaactttaccagtccctgtaccgtacgcttccggctgccgtcttcctcccgcctgtctccttctgcgtccgggtcgatccacatctctgcgaacatcagccggccgttcatctgtagcggtatcatcatgtgcagcaccggcatatagacactctcattgagcagcactgcctgcatcagattcctgaacaccgccttattctcactgcccgcagctccggatacgccttcgtctatgagtgacgcaagcttgtccatccacttctgctggcgcaccgacttttcaaattctgtgtttccaagcacctgcatgagcatagccggatcaaatccctggaaatacttctgcattccctggaatttcataagctcgccgaacgcctccataagccgtacgccggaactgttctcacaccttgccgtgtacgctgccagctgggctgtcatatcccgcagcgtcccccggtcgtgggtccctgagatatagcggttgagaaatggaagaatcttttccttcaaaatggaggcattctcctccatcccgctgctgccggcccctgccttgtaattcagttccccggacatggactcaagctgttcccctgcgtcctggaacattttccctttcagcgtttccagcagatggccgatattgtgcataatgtgcgggctttccgccatatccgtataccgtctcacgaagtcgagcacgagacttttaagctccactgaattcgtctgttccatcacctgcctgagaagtgaaaagaacgccccgttaaaccggatagacgcattgccctggcctttgacgaacgccagaagctcctgcggctccacgtccaccatggcgagaaactccgcgatctgctgtgcgtaaccgtcctgtagtccggattctgccagtgtagaaaacctttcaaaaaatagttttgaaaattcttctgccatagcaggcatttcccgcatctgctgtatgaaattgtcatagttggattcatactggaacttcaatcctacattctggtcctgggatgcggaatcacttcttgcgtccggcttcatgaccttctcgggatttacctgtccctggatggccggatccgtatttctgaccgggtttgtcctcacagaattcgtattttcatatcccgccacaggggtcgttacttttaaaatatttgacattttttcacctactgtaattatcttttgacattttcagccgatatatagactatatgagtacattaacataacatcctctggatttgcaatgttattaaatacaaattaaaaataaggtggtgcacaaagattatggacaatatgactgacagcctgcttgagacttatctgtttgagaccaattctcttttggagcagctggatgaactgctcatcaatgccgagaaggcaggcgaattcacatccgacgatgttaacgagattttccgcagcatgcacactatcaaaggctcctccgcaatgctggaattccagcctttgatggaggtagcacaccacatcgaagacttgttcttctttatcagagaaaatggaacaggttccctgacagatgatcagaaaagtgaactgttcaatctgatgttcaagtcaaccgacaggctgagggcggatgtggaaaaggtggaaaacaacgagcctctcagtatgaatatcgacagctttgtaaatgaaattaacagttttttgaacgaactgcgctcaaaagatgaaaaagacgcgccaaacgcacagtctgataccaaacaggcaggggatccaggcagtgagaacagttccggcaaagcgccaaaagacgttccggatatgaatgccccgtacattgtgcacgtcttttttgaagaagactgcggcatggaaaatctccgctcctttatgttgatcaccgccctgaaggatgccggcctggaattttccttcaccccggaagatgtggagaccaattccgatacgagtgacgtcattgcagagcagggattttacctcgcctttctttcacaggaggaagcggaatcttccataaagatcattaacacaacgagcaatatccgttcctacgaactgatcgaacggcctcaggaccttcagaaagaagaagctcctgttgccaaacagagcagcccgtcggaagaaaataaaaccgcggccgcccctgctgcttccaaacaaccttcccctgccggccacgcgaagcagagcctgatcagcgtaaacttaagtaagcttgaccagctcatggcaatcgtcggggagatcgtgatcacggaatctatggtgaccgcttcgccggaactgcagaatgtgaagctggacagctttctcaaatcagcccgccagctgcgcaagctgaccgatgacctgcaggatatcgccatgtctctgcggatggtctccgtctccggtgtattccagaagatgaaccggatcgtgcgggatatgaagaaaacgctgaacaaagatgtacgcctcactatcgtcggagaagacacagaagtggataaaactatcgtggacagcatcggcgacccgatcatgcacatcgtgcgcaacgccatggaccacggcattgaagaggacgtgcagacccgtatcagcgccggcaagcctccccagggagagatcaagctctccgcacggcatacgggaagcgaagtcatcatcactgtggaggatgacggccagggtatggatacagatgccatcctcgccaaagcggcgagaaacggtattctcacgaaaccggaagaagaatattccaaaaaagagatactgtcactgcttatgctgcccggtttttctacaaaccaggaagtgaccgagtattcaggccggggggtagggcttgacgtcgtcaggaaaaatgtggaagccataggcggaaccgtctcgatcacaagtgagaaaggacagggaagctgtacgactctgaagattccgctcacgctcgccattgtaaacgggatggagatatccatcggcaaaaatgtatttacgataccgatcgcccatatccggcagtcgttcaaggccgagcagaaagatatcattctggatgcttccggacatgagatgatcaagtgcatggacgaattcttccctatcgtacgtatccacgatatgttcaatatggaagaaggatacacaaatatcgaagacggcattttgatctgggtggaagcaagcgacaaatcttactgtatgtttgtagaccagctgctcggcgaacagcaggttgtagtgaagcctcttccgtcttacctgaacaactttaatatcaagcattccggcatcagcggatgtactatacttggagacgggaatatcagcatcattctcgacgtcgccagcgtgtacacagctgcccaggaaatgttttaactggaataaggaggttagagatatatgccagattctatgatgctagacgagacagcagaggatatagtcgtatccgaaactacagaacgttttctcactttcatgtctgacggccttgtttttggcgtcagcacggaaaatgtgatcgagatcatcaccaattatatgatacgcccccttcctatggttcctgattatatcagggggatcatcaatctgcgggggcaggttctccctgtaatggacatccgcctgcggatgaacaagccattccgggaatatacctccactacatgtatcatcatattggaaatcaattctacactgataggtattgccgtagataccgtgctgcaggtgcaggatattgatactgccgaagcctctcctattccggtcgagaaccgccaggagctcaccaatgccatgatatcactggatgacgggaccgttgtgcttctgctcgactgcgatgcgatactgcgtatctgataaacaagaagggatgtattgcatatgttaagcttatctgaacgagattttcagcggctcgtaaatttcgtcaagacaaattacggcatcaacctggagcacaagcagcagctcattgccggcagactttccaatgtaatcacatccatggggtacaatactttcagtgaatatatcgatcacatcctctccagaaaaagtccggaggatatcgaaattatgctcaacaagctgacgacgaactatacgtacttcatgcgcgaggaggcacattttgattacttccgcactacagtcctcccctggcttgagcagaccaagaaaaaccgtgttttaagcatctggagcgccggctgttcctcgggacaggaaccttacaccttatccatgatactaaaagattattttggttccaaaaccgggatgtgggacacgcgcgtacttgccaccgacatttcacagaatgtgcttgacacagccgcagccgccgaatatgaggaagaatcacttcgcaatcttccggcgggatggaagggaaaatatttcaggaagtcgtctaaaccaggtttctatacggtggcggactgcatcaaatcaaatgtgatcttccggcggtttaatctcatggaaccgatacggtttaaactgcagttcgatgttatcttctgccggaatgtaatgatctatttcgaccagccaaccaaggaggctctcgtaaaacggttttatgactccaccgtcccggggggatatctgttcatcggccattccgaaagccttccaaaatctaatattgattataaatatgtaatacctgccgcatatcgcaaataagcatgcggcaggttattacgatttaaaaaggggatatgaaatgacagaaaataataaaatacgcgtcctcataatagatgactctctcgtgttcgacaggtttctatctgaagcacttccaaaagccagcagcaatatagacgtagccggttattttatgagtccatacgacgctctgacaaaaatacctgtactcaaaccggacgtcataacgctggatgtggagatgccgggtataaatggaattgatttcttaaagaaactgcttccgcgctatccgctcccggtcatcctcgtatcttctctcaatgtcaatgtgtttgacgcactctcaaacggagcggtagattttgtcaaaaaacctgatatgagccgcaactatactacacagctgttcgtacaaaacctgtgcgcgaagattctcatagctttcagagccaaagttaggctgccggaaccgccgcgcccgagcctggaaccggcttcaccgccgcccgcggacagctctgcagcttcaaaagaaggtggccagacacacttttcactgaaggccaacaacaccctgatcgccataggcgcctccacaggaggcaccgaagcaacacttgagatactaaagaggctcccggccgatattcccggtatcgtcatcactcagcacatgccggaaggcttcacaaagatgtatgcagaccgcctgaaccggctctgtaaaatggaagtccgggaagcgcagaacggagatatcataagacccggcctggcgctcatctcaccgggaggcgacttacagacaaaagtcgtccgcataggaagcaaatataccgtcaaatgctatcccgcagaaaaggtcaacggacaccggccttctgtggatgttctgtttcactctgccgcagaagccgcgggcggttccgccgtcggcattattctgaccggcatggggcaggacggcgcggaaggtctcctgcacatgcgccggtcaggcgcttacacgatcggccaggacaaagactcctgtgtcgtatatggcatgccaatggttgcgcaccgtatgggaggtgttgtaacacaggcgccctgctgtaatatagcggatatagcggttaaatatttaaaaaatctataatgtccctctgcaattcctacattttgggacaaagcgccccctattttcaataatccacagaatatcagaaaggccgccgcggtccatcaccgcggcggcctttctaaaacgtatccggttatggcaggaacctgtccccccaccttatacacacttttgataaagccaggtacatccagggcagctttcgcctttcccgcttactcctgacgctctatgccgcggcatttccgataggccgccatggaggcgcagcccaggaggaccgccaatattatcaccagccaaggcagtatgtctgccggatcgcccgtctgcgggacagtgtccgaattgatggtgatattcctggtatgaggcgcgccgtccgcggtgcgggtctccgccgtgcccttgcctgggatggtaaacgccggtatcggaatcttgaaaccgcggtcgctcacattgccgtccgcgtccttcaccacgatgtaaatgtcctgggctccggcagagagggtggtgagacggatcgtctgaaggccggtcccacaggccgtgcccctgccggtggtgtcgatggcgggccgggccgcgccgctgtccaccacggcgtagtaataccgaccggccctgctgctggtgaaggtaacgttggccgccgtatcgctcgtacggacagccgtgccagctttaaggacgggggccgtggcgttaaaggcggtaaacgtccatctgccgaattgggccatgccttttccactgtcaaaagcatccgcgctgtagcccgcgccgccgaaggggtagtacaccgtgccggtggtagcgtttgccgccattgcggataatatatagctgccgatggcgggggcgtctgcgccgtaaaagcgcaggctggtgagactggagcattcttgaaacgccctatcgccaagacttgtaaggccggcggggagacgcacttcggtgagagcggcattccccaaaaacgcactgccgctgatggtagtgagccgggcataaccagacaggtccagcgtgccggtgaagccacatctttggaaggcgctattgccaattttggtgagaccggacggcagctccgccgcggccagatttctgcagcctgaaaacaagcccgtgggtatgaccgtcatttgggccggcagccgcgcactggaaaagccgcagcctcggaacgcagactctccaatagtggtaaggtttgtcaggccggtcaggtccagccctcccgtgaacccacagccctcgaacgcagaccctcctatagtggtaaggtttgtcaggtcggacacgtccagccctcccgtgaacccacatgcatagaacgcagactctccaatagtggtaaggtttgtcaggccggacacgtccagccctcccgtgaacccacagtaatagaacgccctactgccgatggtggtaaggcttgtcaggccagtcaggttcagccctcccgtgaacccacagccctcgaacgctttactgccgatggtggtaaggtttttcaggccggacacacccagtccccccgtgaacccacagccctcgaacgcagactctccaatagtggtaaggtttgtcaggccggacacgtccagtccccccgtgaacccacagccctcgaacgcagactctctaatagtggtaaggtttgtcaggtcggtcaaatccagccctcccgtgaacccacagccatcgaacgcactactgccaatggtggtaaggtttgtcaagccggacaagttcagtccccccgtgaacccacagcctgagaacgcactactgccaatggtggtaaggtttgtcaagccggacaagttcagtccccccgtgaacccacattcagagaacgcatacccaccgatggtggtaaggcttgtcaggccggacaaatccagcccattcgcagtgagctttttccaactctcaaacgcatcgtcatggatctgcacaagattcaccgccccggtgatgtccagagtggtggccgctgttcctcctgcaaaggctctttccgcaatctccgtcaccttataggtgttcccgccgccatcctggaccgtggcagggataacgagggtggcctgcgcgccgcccgctccccagccggtcagggatacggtgcgaagatccgcgccacttgtcagcaccttgtactcaaggccgccggcctcaaaggtatcggctgacgcatccctatcggtggcggcagggagcgtcacgccgacggctgtttccgcctgtacggccggcgttccggtgtccgagttggatgccccgcctccgtcttcctcataatctgtcgggacgtttattcttaccggcagcccgccgcagctttcatcatgcacatggccgcagggcgccccctccacagcggggacatagccgcagcttccgtcgtgaacatgggtacagccgtcgtttgcggcaaaggccacagcgggcacatttccgcagaaaagaagcgccgcgcacaacacaaagcccaaccgctttttcgttctcatctcaactttcatcatttatcctccttcaggtcaccttttttagttgccgcgtaactgcgcggtgccgttgcgcgtatacagacggtccgggcgccggccgcttcgcagggaatcgaaagactgccgggggctattgtcccgctcttttccgcggcttctccggaggctttgtacaagagggcggacagagggaattgttgtgcctgtgtaacaggcacaacaagggggtacccccttgtgatcagatattcgccgcccggctcgttgccctcacgaagaaagcaaaacagaaagcctgtaaagactttctgcgtgtatggtttattccgctttcattttaccataagaggcgcaaaaaagggcgaaggttgaaaaatttataccttcgtccctgcatgattccgtttttaaccggcaggcacgcaaaaagctccctgtaatgatgcttcattacttggagctttttgttttcccgttcacttggcataagccgtttttttctttatacttttttatggctcactgccaaaacgctcatttttttattgattattcatttttatgatctggtttactgcaataactgaagaactccctgaggaatctggtttgcctgtgcaagcattgcctgagaagcctgtacaagaatgttgttcttcgtgtaagccatcatctcgttagccatatcgacgtcacggatacggctttctgcagctgtcatgttctctgtcgttacacttaagttgttgatggtgtgttccagacggttctggatcgcaccgaggtcgcctcgtgtagaagaaacagagttgatcgcgttcctgatcacgtcaacagctgctttcgcgccagcctgtgtggagatatctacaccgctcagtccaagtgcgcttgtgctcatatcgccgatagatactgtgagctggttaaagctttccgctgtatcaccgatctggagtgtcaggccgtttccatttgtcccggttgtcgtgcctggctttaagtcaatgttcgtaccgccctgtgctacagcgcctataccagtcttattgttgatcattgaaatcatagcagtcacttcatccgcatccggattagcagcggcagtttcaatataattaacatctgatgccagtttcttagctccgtctgctgtagcaaatgcaaatttctgaccgttgatttcaaagatatgatcttcagcattccctgttccgtcaaaagcagcgagacctgccgcgcccgtatttaacctgtagtatgcgtctgtccctgctgtagtagtagcatcaccgacagcatcggttacagatgtgcctgtattatcttttacatcagccttaaagatttccagtttatttgaagaaccggcttctttagcagtgatcgtggcagtatcgcctgtgacgtcgatcgtgaagtcagaaccaaacgcatcctctaacgcgctcttaagtacatcgtcattatcgcccgccgtattgcctgcagctgtaaactcgatgctctttgactgaagattgccattagcatcactgaaggttaattccatcgtatacttgtcgccgcccgtaagcttggtgctgtcaaagtcaaatgttgagcttgttgttaccgcctgctgcaatgccagcacacccggattggagtttaatccggcaaacttcacatcaactgccacagatgcccctgaagtgctgccgagtgagccgtccagcaggttgataccattaaagttagtaccttcagaaattctgtcgatctcgtctttcagagactgaatttccttctgcaggtttgctcggtctgttttgttatcgtatgtaccgttagcagactggtcagccagctctaccatacggttcagcatagagtgaacttctgtaagagcgccttccgctgtctgtactaaagaaataccgtcctgcgcgttcttctgagcagtctcaagacctgtgatctgtgcacgcatcttttcagaaatagcaagaccggcagcgtcatcgcctgcgcggttgatcctgtagccggaagacaacttctcaaggtttttagatacagcactattgttatttgttaagttgcggtatgaattcagagccgcgatattatgttggattctcatatataattcctccttgaattgatttttccagggcttccctgccctgtttgctttccctttagtgttttgttttttaatcatagggaaggaatgatatattatattaatgtcatgctattttacggtatgatttgtacaataaagtctgtctaaactttcggccaattctttttgacgatgtgggtatagatgactatatatatttaaggtggtctctacattttcatgacctagtctctcggctatcaggacagggctgactcctaattcaatcaatagacttgcatggctgtgcctcagatcatgaattcgtatttttttaaccttagtattttcacatgcttcattcatgaattttgaaatatggtatcttgatataccggaaaaaatccgctcatccatgtcacggtcttcttttaaactgaaatatttttgcagttgttcaattagaaatgcgggaagcgctatcacccgaaagctttttggagtcttgggcggcgtgatatagtctgtttttctaattctgcgatatgattttctcacggtaactgtaccttttagcaagttgaaatcatcataactaaaagcaagcatttcacctatacgtactccggtatagtataacagagaaaaaataagatacatctccatattttctgaaaagtattcaagaaaaatatgaaattcttccggcttccagaaggttttctgaccagcctgtttttttcccatgctcccggcggcaaggcatggattagacggcaggttataataacgtaccgcatagttaaagacagtagataactggttattcattgccttaaggtacgtactggaatagcgtttgccgttgttcatatgctgtccgcacattatattctgccattctctaattgcacctggttcgatctgattaataggtagatttccaaagtagggaagaatctttgttttaatcaaattgtcttttgtcagtaacgttgaatctctcaatctgtgtttcatgctttcaaaataagcggaatacagatctgaaaaactcatatccagactgccctcatgttgattgataaatgaacgttcccattcacgcgcgtcacgctgcagtcgaaacccgccttttttcttctgacgaatccttccaagactgtccttataataaaatttacagtaccatgtttgtgaactttgatttaaatatgttggcataaaatttctctcctttttgattctaaatgtatcctttttcctccttttagaaaatagcaatttgtactgcactggtacttaagatattttcttttgaaagtataggctgagaatgactggaaataaagggatttctaaaatattcgcgggtaccatcctggtactaattatttatatccccaaaagcccatttttaggggaaaaataaaagtttttacaaattctctaattccttcttatttttctttattaattgacgataatctaattgaacatgataaataagaattttcttaatttaataatctggaaatgccctgtttatcaacgtttgacgcgtcaagtaacaaattttacggattaatttccggaacctttctgttctgcagaaagacattttttaatcattccttcccaatgattaaatattacaccaaagggaaagcaaacagggcagggaagccctggaaaaatcaattcaaggaggaattatatatgagaatccaacataatatcgcggctctgaattcataccgcaacttaacaaataacaatagtgctgtatctaaaaaccttgagaagttgtcttccggctacaggatcaaccgcgcaggcgatgacgctgccggtcttgctatttctgaaaagatgcgtgcacagatcacaggtcttgagactgctcagaagaacgcgcaggacggtatttctttagtacagacagcggaaggcgctcttacagaagttcactctatgctgaaccgtatggtagagctggctgaccagtctgctaacggtacatacgacaatgcaacagaccgcgcaaatctgcagaaagaaatccagtctttgaaagacgagattgacagaatctctgaaggaacaaacttcaacggaatcaatcttctggacggttctctcggaagcggtacaacaggtgcaaaaatcagtgttgctgccggtacaggcgcaggcaaattagttaatgcagtagacttctctgtttccggtctggaagctggcaagacggttactattgctgcagcagctaaaggtacagcatcctctatcacggcagatgcttctggtaatattaccataactttggatggcgataaggccaaaacatatacgcaggctgatattgacaaacttatcagtgacgctacacttccggcttccgcttccggactcaaaatcgaaatcagcggagatatcaaacttgaggacgacggcgccggcgcaattgcggcggctactacaatcgctgatgccaaacatgctacagcaacaggcggcggcgtaactgtaacatctggaactgcgggcgttgacacaagaacacttacttttgcggcagcaggtaacataggtgcaactatcaatgcagctaatggcaatgtggctcttaacctggatgcaacaaaagcttacagcgcaagtgaaatcaattctatactcgcacaagccggtgctaacatgacggtttcttttgatggtacgttaaccggcacagctcttgccggcaagggcggcggaactgatacggacggtgtatttgcactcgggacagacggaaccgcaggtgcaggtcttgctgcaggcggcggtcttgaactccagattggcgacacagctgaatcctttaaccagttgaaagtaaaggttggcaatatgagttcatctgcacttggaataggcgctattgatatttctacccagtcaggcgctaaagctgccgtagacttgatcaagagtgctatcaatcaggtgtcctctacacgtggtgatctcggtgctatacagaaccgtctggagcacaccatcaacaacttaagtgtaacgacagagaacatgacagctgctgaaagccgtatccgtgacgttgacatggctaacgagatgatggcttacacgaagaataacatccttgtacaggcttctcaggctatgcttgcacaggctaaccagattcctcagggagttcttcagttattacagtaattacaaactgtcaattaagccagccccaaaacgggctggctttcaaatgcatgtatttttactctctagtttaatacttgttatccatcacaaaaatagcagaaaaggctaatttcataatcacttgcagacttaaatcaaatgtgctatattaaagacacaaagaacaaccgccaaagtggttgacctgaatatgaattgaaaatccacccagtccgccaagactttgaagggtggtttttctatgcactaatgactaattaaataaattaaggtcagtaacgcaattatgaacataccaaattgcatcaaatctttgaaatcaaatggttttttgtccatcagcatcacctcccatctatgtaaaatgagaggccagccacccctaacggttgtcctttcaaaagtttatcatatttgataccaacgtacaatattgtcatgcgcaatattacaataaaaggcctcaaacttataattccttccctatgattaaaaaacaaaacactaaagggaaagcaaacagggcagggaagccctggaaaaatcaattcaaggaggaattatatatgagaatccaacataatatcgcggctctgaattcataccgcaacttaacaaataacaatagtgctgtatctaaaaaccttgagaagttgtcttccggctacaggatcaaccgcgcaggcgatgacgctgccggtcttgctatttctgaaaagatgcgtgcacagatcacaggtcttgagactgctcagaagaacgcgcaggacggtatttctttagtacagacagcggaaggcgctcttacagaagttcactctatgctgaaccgtatggtagagctggctgaccagtctgccaatggtacatatgacaatgagacagaccgtgcaaacctgcagaaagaaatccagtctctgaaagatgagatcgacagaatttctgaaggcactaactttaatggaatcaacttgttagatggttccttaggcggagcgacagctactgcatcagcaactatcagcggttaccagatcggtggattgtctacggatgttaaaggaatcaaaatcacttatgatgcaggaacaaccggagatgctcagactgcagcagtagatgctctggatgaaaatggtatcttaaacattactgtttctaacgatggtactacactttctaatgcagatttagaggcagctttaaaaaatgccggttacaaagatgcaaaggttactggtacaggcactaaagttgctgctgacgtagctaaagtagatactactaaaattgacccgacagctgcaacgatcgccggcacacgtgccgacggctttaagatcaactttgcaaaaggcgagactggtcttgccagcgtacagataacaggaacagctgcaaatggagcgcacggttcaacaaatactgatggcgccgttgtgatccagcttgacaatacgaagtcctacacatctacagaaatcaacaaaatattgagcgatgccggcgcaggcgctatgactgtagaatttgcaggttcaaaattaggaagcgacatcgtagccggtttaggacttgataccgcacagaatgttaccgatggtgttggtaagcagggcgcaggcctcacactccagatcggcgatacagcagactcttttaaccagttaacagttaaggttggcaatatgtcttctacttcccttggaattggatctattgacatttccacacaggaaggcggaaagaatgcagttgacttaattaagaaagcaatcaactctgtatcctctacacgtggtgacctcggcgctatacagaaccgtctggaacacaccatcaacaacttaagtgtaacgacagagaacatgacagctgctgaaagccgtatccgtgacgttgacatggctaacgagatgatggcttacacgaagaataacatccttgtacaggcttctcaggctatgcttgcacaggcaaaccagattcctcagggagttcttcagttattacagtaaacgcttctattgatatttattttatcaaagatgttaaatagcagaaaggaaaccggataaacaggcggtttcacctgtctaaagtctaaaacggcggctttgaagataaactcttcaaagccgctgtttatttaagccgcaaaaaggcaacgcatctaaatgcagcctcatggtttttactgtttgttttttccccgcagtcttttctttgcttcttttatggtttccccgtcttttgtaaggtaccggtctacaaaagcatcctctattttcgtataacctccaacaactgtatcctctatttttccaaatgttcctacaactttctcagcaatcttttcatttgcctttacaattttggatctcgccataattacacacctttcctttttattccttttctcattccttaatgcctttcctcaggggaatcaagcagagcagaacgacaatgcggcaaaactgcttttcttcatacaaatcacctccataaattattaaaccaacagttgttggtcctttgtgagtttagtataatggtatcagacagcagaaacaatcatcaatatgtatacaagtgttggaataataaaagagggatatcatgaacataaaaaataatcggcgccggcgggaatctattgaacggatagaaaaggtttttattgaattgctgcagacaaaggagcttcacgaaatatccgtttcggacatctgcaaacggtgcgaattaaaccgcagcactttttacgctaattattcagatatttatgaactggcagacaaaataagagaagctttagaaaaagaagtaaacctgctgtatgaagcagagacgacgcagaagtttaacagtaatgattatctaagactgtttcgccatatcaaagaaaatcaactcttttaccgcacttactttaagctcggttatgatgatcaatttaagttaaagtattatgacgttcatcaggcaaagcaagattttgataatcgacatattgaataccatatcgaatttttcagaagtggatttaatgcgatcgtgaaaaaatggcttgcaggcggctgtaaagaaacaccggaagaaatggacgaaattatccgcagcgaatatcagggacgcgtttcattacaatagacacgaaggtgccggcgcgggagggaaagacagcgcgccggccctgtttttcattttatggcttagttccaggcatcaaactgacgatatatactatagaagaaacaagacacagcgcacagcaaagtacctatggaaatcgattctcacaggaggttcatatgggtattattaataaaatcacgcagtcccctgcaatcactcatacggagccgtcatctgctgcccggaaggaacgtacgtcctcttctgtctctcagaccggccctgcgcagccaaatgaccatgcggacttatctgcagaatggacatataccgacgataccaaagcattggtccggcagatgctttcttccctgcaggagaaatatcccggcatcggcatcttcataacaggagaacttgacaaggatagtctgcgcaatgcggccgcgtctctcggtgaaggaagttatcttcttctctctgattcatttctccaaaagatgcagaacagccaggaggactatgagaaaggaaaatcaatccttgtacagctgctgaaccgcctttcttcctgcgaagcccccgggcgggcacaaggcttttatgccgcaggacaggagacactttactggacggcggaagcatccgcagataaatcgggtcaggttcaaaaggagcagaatacaaacgcgttctcatggaacggaacaaggcaggacagttccgatatttcaaagactatttacagtaaatcgggaaaagtatccctcaaggttatctcacactcatacaataatcttgcgggcgccaggacaaagggacaggtacagactgtcatgtcccgggccaggcgtgatatcgctaatctccgtcttgctgccagcttcggggacagtgaagaacgtatgaaagccagaacggccatttcatccatgcagaagctgctccagagaggcggccgtaagatccgccgcctgaatgaagcagagctgactgctctccgccagaaacgggcgcagaagcgtcaggaagactcccgtgcccttaagcttaagctggaacggaagaaaatggagacgagaaggcggacggcagatgcatgtatccggaaggaaggacagcttgaagaactcaaccagtctttccgcttccgcagatataaccggtatgatcctgatgaaaagccagaaaatgttcccaatataccggaactttcacttccgcaggatatccccgctatgcaaaatgccgatgtcccggctttgacagccgctgacatcagcatttcatccgtacctgttgatttttaatacatacccgtctgttattttccatctatagcatggatatgcgacgcaatctttttgtcttctgttctgatatgagatatgaggattccgatgagcctgttcacttctgcaagggatgcgatatctgcatcctttgacaggagttctttaccggcattgtctatctgcgtcatatacccctgatggaacttgtggtgtgcgtcatatcccgggtatttgtactgcttctgcagactttcctcatcattaaaatgcttctttacataatccatgaggaatttgaccgatgactctatctgagccctgccctttccctgtgcgcacgcatcctgaaggttattcaccatctggaacaactgcctgtgttctgaatcgatcagtgcgtttccagtttccagttcttttgtcacttcgtatttcattttagatctcctttttattatcatattagaatattatcttttcaaattcttcgtcgcacataggttttgaatagtagaatccctgtgcacattcacagccgtacttttcaaattttgtgatatcttccattgtctccgcgcgctcggctaccgcccttatcccaagatcacgcagcatccggaatacgttgcgcacaaatatcttctcccgtctgtccgcgtctcctcccggaaagaaggaaggatttaccttgatcatgtcgatcggcacatagcgcagcacattgagggaagaatactctgtggccgcaaatttatccattgatatctgaattccgtaatctctaagctcattgatcgtatgtatcagttcagaatccagctccgtgacgataatgctttcttctatttctaagataagaagcactcccggtatgtcgtaccgcttcacaatatcgagcaccttcggcagaaagtcttctctgtgaagattaagcttggatacattgaccgtgatcggaaccgtcacgagctcctcttcgatccagttctttattttcttgcacgcctcttccagcatgtacaggtcgagattgaggataagtccctgtttttcaagaaccgacaggaattcattgggagtaaggatcccccgctccgggtgattccatcttgtcagaagctccgcccccacaggcgtccccgtcttcagctcatatatgagctgataatatggaatgaattcccggttctcccagcctcttttcacttccctgctcaggctgtccagcagtctccagttcgggtctcccgccccgttatacacttcccccctcgtgctgttgccgtttccgatctgcttcagcttaaggagcatattgtcaaggatgatcttgatatccggtatgtacgacttgtcaaaatcgagaaaataaacaatatatgtaaatgtataatgattgctgtatacaatatcctcatcccggaagttgacttcttccatcttcttgacctgctcctgcagccctgcaagaaacgtatcacgctcgccgtacggcgttatcaccgcgatcaggtccatctgcagcgagtacgccttcccccccgaacgctctgcatagtcggcgataagtccgcttaagatctttacgatggtctcgatcatttccattccaaatattgtgttcagatgattgaacctgttcaattgtataatgacgagaacttcgtttgccatctcagccacatccgaatattctttttccagaagttcccggctgccaagccgctgaacgccttccgggctgtccggtgtttcttttgccggcttctggcgttcggccgttcctgatttaaaaaaattaatcattgctatctttcccttctgttatcacgtctatatttccgcctacaagatatatctttgtccggccgaagcgttcgtgccggttgcggaagggggcgctgttcaactcgatatatatgttggagtgaagtacctccatggctctgaccatacggttctgcctgttccattcctgtattttcatgagccgttcctgccactgttctatatgcttatccaggtatttgatcagataggcgacccttaccacgacgatcctccatccagcatcatccatcccttccttctgctccagcactttggacagttcattgatcatgctgcttgcttccttgacctgcagcgtaaagttcttccgcttccggtcctcgccgacagacggaaaaagcctgagcgccgtgtatacattggcctcatttccgatctcatccgcttctatcttatttccggcccagtattcgccgccgacaagcctgcctctccttccgaacacgagcatactctcccagcactctaccttgctgttcataacgacatccgcgtacacattccccttcacaagaacctctgcattctctataaactctgcccttatgtctttgcccgccgccagtgattcacgcccggcgcctttcatgccgtttctgaggataatatttctgcccgcctccagactgccttccacgagtccgtccactataatgtcatccgtcgccgttaccttgaatccggcctgcacatccccggaaacgtatacggaaccgataaagtctatattaccggtcttgccgtcaacattttcaagctgaagatatttacagacatggatcaccccgtcctcctctacgggaaaaccgtcacaggacgcatatattcttttcttatccgccgacagcagcgtattcatcccagcagagacattcgcgctcctgccttcaattccgggtatgatactgccgtccagccctctcccttcctttccgcgcgtaggagggatgatctcgcataagagatctcctttgttgaccgtcttaacgtagtccagcgacttataatctgctttgccctccgcgtctatcttcggcgccaggctgaagtctttattaaaatgatagatgacctttccgtcttcgccggcctcgggacgctccccctgcgctatacggaaccgcttttcgtatatggggcgctccacaagtctgcggatgtaggattctttaacgccgtacgtaacgccctttttgatgagcagcttccagatatcattctctgtcagcggtttctctccgggaccgggccggtgcagtatcagtttgagctccattccgtcatcggtctccacgaagctgctgcgtccgtcttcccgctcctgcgtgttgctcattccatagaaaagcgcccggatactgtcctgttctttcttcttctctctgcggatctcttcccactgcgagccgcgctccagcattttctgaagatatactttccagccttcacggagcagtccttcaaatgtgatccccgccagatacgggtcttcaagctgagaccggataaattccttatccggccgcattccaaaataatttctttttttcagatattgttctaattctttataagttacttttacctcatccactgtgcataccttcactctatatcctaattatttaaagcgtttttttaacagccatataagtgcggcggcggacagaaagattcctgtgaccgcgtaagtcagcggcgctttatcccctgtgaggatcttcttaagcccgtttgccgcgtctgtcagcgcctgcaccgctgaatccagcgtaccgtctccggaacctgacgtaccgccggctcctccggacgagcctgtgccgcccggctgtttcccttccccggatgctttggccgcggcggcagccgccttccactgagcagtcagcgtcatgtctcccgcaactgtatcctgggcaaaattccagtctccgccctcggagctcttccatcctgtcagcacatacccttctctgacaggcgccgccggttccggaataagggaaccgtacggaagtttctgggcagccggtcctccggtgcctcctgcggcgtcaaacgtgaccgtatatgtattcggtttccatttggcataaacagttgtattgccgtctacaaaatcttcttcaaaatcccacgcagtcttgtattctgcgtctttaaaccaccctccgaacacacagccgtcatgttccggcgcctccggcgcctccagcagacttccccagggcagttccttatcttctatctccgttcccccgtatgtctcaaaatggactttgtacagcgtatcagaccagtaagcatagagatccgtgtcaccggtcaccttgtcccttttaaatacccactgatgttctttctgccagtcaggagcagtgaaccagctgctgagtgtcttatgcggaatggccttgtccggtttcgcgatataatctcccacctgatatacctttgtgtacgtgatgacttcctcttcctggctgtccttgtcctcacggtagtgcagtcttacggtgaacttttccagctcccacgccgcatagatggtcatatcccggtctacatactcgctctccggggcaaaggcttctgtcagccccgggtccttgaaccagccggtaagttcgtatccggtacgcttcgtcttaagcagctctttatctacataagttccatacgtcaccggtaccggatccagcggtgttcccccgttcgtctcaaaggataatgtatatacatccgggatccagccggcatacagattcatgtcacccttcaccgtatccgtgccaaagttccacggcgttttatcctccgcctccagatcagcataccagtcgtcaaattcatagtgctctctcaccggatcattttcaggtcttgtgatcttctccccgaaatggactccctgcacaggtgggatattgttttcttcatctccgtcgtatgtgacaaacgtcaccgtatattcatcccacgtccagtacgcatacagatccagctgctcgtctgcgggttctgctctcatatcggcaaacttccattcgctctctgccgcatgatcaggcgaggtaaaccagccgttcagcgtatacccgtcacggtgctttgtctcctccagactctccagcatatctctgtcaagaaaatctccgtacctgatgtcttctgtgggagtcaccgccacctcttcacccggatgctcggcgtgctccggctcatatgtgacatgcagcgtaacatcgaggagattgccctcccagccggcatacagtaccatgtcaccggtcaccgtatctgcgtcaaagtcccagaggtgagtatgttcttcatctgtaaaccagccgaggaaatcataatgctcccgggccggttccgcaggcacggatacgttctccccataatggataccactttgatccggcggcggattctcatcgcctgcgtatgtgtggaaggacacggtatactcatcccactgccactgtgcataaagtgttacaggctcttcaaccagagttgctcctgcctccccggagaatatccagtccgtcccgcttccgtctgcttctgtattccagccgaggaatgtatgccccggccacgcgtcatccgtctctggatatgcaggggcctgtacggtacggttgaatacgacctgctgcattttctcattatccggaagctccggtgcatccgcaggggtctcaaatttcacatcatagacttctgcttcccactgtgctttaagactcacgtcttctgtcaatggttcatccatgccccacagctttcctgccggcgtgcgccagccggttatcttatgcccttttttggtaaacacgtcatccagcccgtccgcgccgtactgcgtctccagggtactgccgtaaggcaccgctttggggatctcttcctgaggagcagcgtccttatctccagggctcagcactgcatagcatgtcttctgtctccacttcgcgtacaggtggaagtcgccgtccgggtcgataagctctgtgctgaaatcccacttcttcgccggtctgtcgtccgtataccacccttctacctcgtactccgtagtcagtttatctgtccgctttggcttggaagccgacggctcgtcgatcgtattgccgaaaccgacagccagtgtcgtcggcgtcaccatttctcctgcatccgtatccacatgaaaggtaacgatcgtagtctctgccccccagccggcatagagcgtcatcttcgcgcctttcgccgtgtcggtatcaaagtcccactcctgggtacacgccttgtccttataccagttcgtaaaacggtaaccggcccgcagcggcttctcgtccggcctgctcacaagccatgtcgccggaacggtcgtctttctcggccagcctgtgatctcttctcctccggcattcgggtcaaatgtgaccgtgcagtcctgaagccatactgccgtaaggactgtcgtcgcctttgtaagctgcgtaccaccggcgccgaattcccaccgttttccatcatctgtctgccagtacacgagcgtatagcccggattataatcactgcccggcttccagctgtctgctttttctatcgtatccttatatgcgtacccgtcctttgtcattacgttccggttgcctgaccggtagatgaccgtacaggagtccggtttccatgtagcatacaacgtcatgttgtccttaacgacctggtctctgtcgaaattccacttgtcggagtcttccgcagaatcctgtatccggtaccagccgagcagcgtatgcgcgttccgctctacatctgcattcccaggcgctccggttatcaattcaccatatttcacttttttactgccgtcaaagataagcttctcattctctgtctcatggaatgtgccgccgtttgcgtggaatatgactgtatacgcgacttcctggtctttcagattccgaagtgcggcaaaggtatttccggccccggtgaggttataactgtgccgtgccggcgcagccgcgtcgacgagaagatgagaatcctgtacgtttccgtcagttccgggaaaatatgaaacatattctccgccgtccgctgtagtcgacacggcaaaggaacggtgtcccgccggaagagtcatcggatacttctctgtcctcttatttttattttctgcctgtatgttagtcggcgcatccatggaaaccggcgtctcgagcgtaccctgcagaatcttgtttgatatggaggaaacttttacattgcatgccgattcctgatcgctgtatacatgcagccttgcctccccttctaccttgagcgtgccgccctgcgcattatcggttccgcttatgccgtctgctcccgcgccgccggtgacatccagcacgcctgcacctgtaatattgagcgttgctcccggttccagcgtgatccccggcatgtagccagtgccggacacaagtgtatcgtctgtgccgagcacgagtgtgaccgtcgctcccgcttctatataaatgccgcttttctttggggcatccggcgtcatgtttatcttcatcccctgcacctgaatagtcgcagacgcgccgctttttacgcggataccatactctcccgtgttccctgtcacggtaaactgttcgtctcccttcgttccggtggaaacaacggtatccagcttatttttctgttcatagtcaccgttttccgacagcgtaatatttccttctgatatatcaaacgcccccggcacagctcgaacgctgaaagtagtgagcctctcagacagcatcacctgacgtaagtccgtttttccctccgccgcatctttcagcgcgcgcagcgctggagtatctccctgcaccagttcaatactttcctgcccggcggggggcgcttcttcctgtccgctcttatctatgttgccgccggattcttcttgctccttggccgtcccgtcctcctgcgccttctgaccgtcattgccggtctcagccgcgttttcatccacatggatcccgaccgccagcgcctccccggcgccggccgtaaatacaagtgcggcgatggctcctgccatcaatagtatttttaacttcctgaagtttttctttcccatatttctcaccttcactgcatccgggcagctcctgtcctaatccgcctcaaatacactttctccccgccgttcatagtcctcggacatcctcaccatcgtctcaaacttttctatcagaatcgatgagatacttaccgccctctggtaaatagaatccagcatgtactccttgccattcttgatggccgttaccgcctcatctcccagctcatgcagttcctgatgcggcttctctacacttccccatatcttcagtatatctgacttctgaggattgatcgtatagtagaaatgtccgaatccacatttcctcggattagcctgaagcggcacgatctcctttgtatctgcaatgctctttaatgtggcgacccacgtccggtgcgcggagatcgccgatttcatggattcgataaaaatacggttatccagccggtagaatatatccttgttcatcttgccgatgatctccgtgctcgtctccatcttttcttccagtgtctgtatcggccgtatgactttctcaagcagtacatggttcagatcttcaaggctctgagtcatcttaagcaggctgtctgtctctctcccgagatgctccatattctggctcgtctcattgatggaactgctgatctcttcacttgtagccgccaccttggcgatattgtcgacgatctggttgatctcccggccgctgccttcgttgcgctccaccacctcggagacaccttgttctaccttttccagtgagtccaccgttgtgttcacactctttacacttctggccgacgcgatcgtaatattctcaagagacttttccatatctttgatcattacattcgtagcctcatacagcttgtggatctcaccggcaacgacgccgaatcccttacctgcctcgccggctcttgccgcttccaccgacgcattcagagaaaggaggttgatctgattggagatactgttgatgcttcccaccgcacgcttcacgtcatcgatcttccgctgcagctctgccatatcctgcttcattgtcttagattcaacggacacaacggaacacgtctcctgcattccggccagcgccgccttgttctcattcaggctttccagcacatgggctgaattatcggacacctcggccagcgtatttgacagattttcatgttctgccattatcatggccgtatggttggatgtggaagataaatccgcctgaatatttgccccgactgagcctatctttttgccatactttattatcctgtcgcttttatctcccaactccaggttcagactgctcatctggagtgaagcatgaagattgatgtcagcaatcgtctgaaacgctttccttccatctgttatccgtgcgatgatttttctgattttatctgagcgtgtcctggataattccagcgtatccaatgctttttcatcttttcttcccataaccgttcctcctcatgtgtaattaaacattcttattaaatatatatcggcacaaatactgcagaaataaatgattgtctctattttgttcgggtttgcagtgaatatttttgcagcatattacagcagaaaaaacggggcataacagcactatcataaaaacagcatatacaaagcaggaagccgttgtacagcaacactaatgctgtacaacggcttcctgccttgtcttatctaaaatatattccgtattcctttcagatcatccccatattcctgctgcatgatatcagtgaacttatccgcactcttataaaaatacatatcatgtcttacacactccgccgccagggagatcatcggccggctctctgtccagatcacttccgcgatcgtatcgcttatgatctgtccgaataccacctcgctcatgtctgatacgagagtgatccagcggccgcccatctctgctttcttctcctcgcccattccgtgcctgcagtattttctaagaggtatcgcctcatcatcttctgcgccgaatatgacgatcccaagccgcagtcccttctcttccagcttctgaatatcatggagtatacagggaaggtcctgtatccatatctggagcagcagctcttctttcgtctcccggatgatatcccggcatttggcaaacacattgccgtttgtccggatatgccatatataatccagattggtcttctgcggaaatatgttcagccgctccgtcaggtcagacaggacccctttcgtctcgtcttccacccgctccgccacctctgacatcggcaccgcggcatatttattgttactttcatattccgtatagagtataaaacctttcgtgatgagcgactccagaatattatatatctttgagcgcgtaacgccggccagcttgcccgcttcatatcccgacaggctgccgttctgcagcagtgtgagatagacttttgcctccgcgtcggtcaggccgatcttattcaataatatgatctcattgtccatggggaatcctctcctgtcagaagttcgactttacatacaagtcttccggccgtatcttgtcagcaacttcttctttccagttttctttctcatattcttccacagatacagaaatatacttttcttccatattcatctgttccatgatgaacgctttcgtcttctcggccagctctttcttaacttcttccgttcgtcccggatacattttaatgctgatatgcggcatgctgctttcctccctttagttccactgagtgccgactccggccgccactgctttttcgtagatttcttttgcagcgaccagatcctgtgtcgccacgcctactgtctcaaatacgatgatctcctcgtcattttcccgtcctgtgacctttccttttatgacatcaccgaggtctccggtaaaatcgtcttttgtgatgattccttcttcaagcgggataaggatatctccggattcagataatactgcttcctcagaatcaaaatatattttggaagcacgtgtgaggatacgaggatccatctcctgcatgtggtgctgataagcgcctacacagcttacggtagctcctgctttcactttcgttccatcaaatacaggcttggaggaaggagtgactgtgatcagaagatcagcgccctccaccgcttcgtcggaggatctgaccgccacaattttagtaccgtaatccttaagttcctcctgcatgcgggcagcaaagtccacggtacgctcatagttcatatcatacactctgacctcttcaaggtcgcgggccgccatcatggcttccagctgtgttgccgcctgtcctccggttccgatgagggcgccgatcctggcatcctttctcgccagcacgtcaaacgccgcgcctgacgctgccccggtcctaagctgtgtcacatatgtaccgtccagtaccgcggtcacgatacctgtgctgccgtcaataagcagcacctgcgcaggtgaagacggaatcccgttgtcaatattatgcgggaatatgttgatgatcttcagggatgctgtgtccatctcttcaacataagccggcatgaacaagaaacatccgtcatgcttcggcgcctggatattcgtgcgaagcggcgcgtcgcactttccctccacgacaagctggaacgctttcttgtctgcctcgatcgcgtccttgatcgtaaatacttttttgatatcctctctggataataacagcatatttgttcctcctttttgtaccaaattcttgttttaaatttagtaactccttttggggtatattataatgcatcccccgacatattgtcaatgcattcacaatattttcttcagcttttgcggctctcaaaataaatgaactggtctatggcgtccagaatgtcctgaaagtcctcccgcgccgccagttcgatatattttgtgagcagctctgtctcttcttccttatatcttccgtaatatatgtcatagaggttgtggcccctcatgtggatcttgatatcttccatatgatctctcacatcctctgcagtctccagatcctttccgatgaacttccttaactgtatgccgctttggagcttatgaagatactccttccacttttcaagaaatgtctcgtaaaactcttcttccgtgccgatcactccaagctttgccataatagtcgggttcagaaaataattttcaaaggaataatacttcagtatgagcacattcttttccgtcacacggggcagcttatccacatcttctctgctgcgctcctcatagtatctgcaaagctgtcttttcagcgcttctctgtctttgccgtccccgtcgcgcaccatgagaaagttgtctttcaggtatatctgattcatatacttcagatttgcatacgttttaatatttgtgcagctgttcgtcgttatgatagcgatacgcgacagctttccctgctcatcgtaagtctcggaataatacttcctgatcagaaggggcagtctgctcttatcctgctttccctccacgataaatacaaaattgacattcatcaggtcatttgcgctgtacccgagcgtctccagtatagcgctgatgtctgttctttcacacacctgggagcagccgtccccgtcgagtacgacctggcgtatctggcggctgttgaaatttgtgagcatattgggggaatgtgtggaaaatatgatctggttatctctggacagccggtacaatatctccccggacaccttctgcagctgcggatggagaaagatctcaggctcttccactatgatcatgcccggattctgcccctcactctgggcataggtttccagcagagacagcatgtagatgctgcgcattcctttccccatatgtgcaaccggttttaccacattccggctgcggtcatacgcctcggcagtgaccgagagcatccgctctatatcacggttcatcgagaagcgtatctcgtcaagccctccgtttctgctgaagttctcatttaccctgcgggaaaatgcgtccagattcagctgatacaatttatgatccagcagcttcgccgcctcaaacgcattcatctcctccggcttcttctggttgataagaccgatacaggcaaagcagttgttgcacagcttcgcctcgtcaaagatgcagcatcctttccgcatctgtttcagcaggctgtcttcctgcatcataagaagttcttcctgaaactgtccgaggctgcgctgtgtatccatataatagatctgcggaaatatttcctgaatgtacggattgttcttctttgttccatcgacccagcgcacctttccttcccggttcgccacatattcaaaagtgataatctcaccggcataggagggcagctttttctgaaagtccgaaagccacgtctcatatctgcggtactggctgacagcgccgcacttgtgcagtctccttaagtcttcctcacagatttccaggctcatcattatctctatatttggatagtcctcctgaaagtcctcccggcttatcttataagagcctcccaccgcgcggatggcgtccagaacggcggtctttcccgtgttatttttcccaaccagaataagcgcattctcgattccctgaatgtgcatgtcccttatggatttgaagttccttattctcagatctgtgatctgcatatagcttccgcctcctgcccgctgttatctgctgccctcaaaggccggcagccagaacgtaaatttcgttccttccatcgtactgctctctacctggattcttccatggtggaccttcactatccactgtaccatgggaagccccaggccaaaacctttctttccgtctttagtgcgcaccgtgtccgcctgatagaaacgttcccatatatggggcagatcttccttttttatgccgcagccgtcgtcctctacacatccctttatatagctcccctcacgcttaagggatacccgaactgtacctcctttttttccgtaccgtatactgttctccaacagattgataaacagacgtatcaacgtatcctcactgccccgcaccttaagtcccgggcgaatgtccgtcacgatccggattccctctgcttctgcctcttctcccatttcttccgctgtcagctctgcaagaacactcagatctgtttcctgcattttaagcttacgatcccccgcttctccccgcgacaatacaaggagctgctctatcaaagccgacattctgccggcctgcttcaagatcaccgacaaactctccttccgttccctctcagatacctcttccatcagggcaaactcgctctctgaagtaatcaccgacacaggggtcctaagttcatgggatacattggctgtaaaaatccgctctctttccagtgcctcttccaccggccgcagcgttctgcctgtaattatatatccgccggcaattgcaagtaccgcgagcacaggcgtgatgatcagcacgagagtcagcaatacctggcccatcatagacagatcccccgccgatgtcacggcccggaaccagatgatctgttcttccgtacggtaggcttcatcataggtgatccactttttctctccggatgagacggtctgtacctccccgcttttcagcaccgtgtcctttggaaaatgtacgggtacatttccttctttcagtttcccctctgagtcatagatactgaaactcacaccatcatcataatattctgtatcctcttctgtgctgtagccgtccgaacgtatgtcgacctcgtccataaaatcatacagactttcctttaacttgccctccgccttattccatgatactttttcggcagtaaacgcaagtgctgacagtggtcccgccgtaagtagaaggatgatcagcgcgtaccagagtgttattttcattctaaccgacattcttttcatgcttcttccctcagtacgtaaccttttccgcgtacggtatggatcagtttctcttcgtacccatcctctatctttttcctgagatagcggatatacacatctatcatgttggaacctcccatataatcataattccacacatgtgcctcaattgcttctcttgtcagaacgcaccctttgttccgcatcaggtattccagaatctcaaattctctggcggacagctctattgcagcgcctccccgttttacctcgtgcgtgcggatattcatcgtaaggtcacctgcactcaatacattttcctgttctccggacagactgttcctgcgtatcatcacccggatcctggctaaaagctcctcaaaaccgaagggctttacaagataatcgtcagcccccaggtcaagtccgcgcacccggtcctcaatggcatctctggccgtaagaaacagtaccggcatacgtcttccttcccttcgcatggtctttagaacttctgttcccgccatgcccggaagcataatgtccagaatcaccgcatcataatctacctgtcttatatactcaagcgcttcaagtccgtccccggcgccgtctgtgctgtaatgctctttttcaagtctttttctgatcacattcaaaagactctgctcatcttccactaccagaatacgcatatgttctcacctcttgcccttattatagtataaaaaaatgaagatcacattaaaatatatttattcttatattttaatgttgctttaatttttattatatatgattaatatatcaacatgaaaggaaggtatttataatatgaaaaaaaagaaagctgcggcggcaggtctgacctttgttttactcgcatccgttctgaccggatgctcagatgacagggaagacatgctcgaggataaggtagagaaactggagcaacaggtaacagatctggaaaaaaagaatgccggcaatgattccggcggcggtacctcggataaatcaacagaaggacaggacgcctccgggcagtctgccggcaaaagctcagattatgaaacactcaaagcagctgtcgatgccgctgcggaaaaggctggctccgttactccggccgggtctgccgccgaacagcgggaacagtattacgaactaaaaaatgagctggacgatatagaccaccagctggacctctatgacgatatgctggaagaccagtacagaggcggaacgctggacgcggccgcatacagacagcaggaaaaggatatagatgcccttgaggacatactggatacaacagaggacaggctggaaatcctgtttggaattgacgactgagtactgcctttattccacaatactgtactgcatccactcgtacagtagtttagttccttccgcggtctccggggggagcagtgcccgcgccaccatcttaggctcggcaccctcctccttctcatccgtcctcctgagcatggcgtagtctccgtcgatccgctctacaatatattcacaaacaagcatactttttgttcctccttactctttaaaactatcttatcatacatttccaggattctgaaatataaacaaaaaaatcaccgttcctggagtcgcaaaaagctccaaaaacagtgataaaaatgcgcggtcaggggcccaaaacctggacaccctgatcaagagtcaggtgctctgccagctccattaatggtacatatgaattggctctccattctcattcgaccaaaaatagactaggcaatctgaatccctccatccgccgcatacttgtataacagatgtgcattgctgtgcaaaagctgttcaaacattgccacctcttcgtctgtatacccttcttttgaaatccaattatagtccggaagttcacaacgtgccgaatcaaacccctcctctgtctggcgttcaaaatgtactataaccttctgcttcccatctttatcaataatctgcgaatgaacaatttctgtttcgtctgccaatgtcatatatggatacatcataataaactacccccatccctttaaagatccgctgcagtttctgcccatttcactattattatacccaaaatacacaaacagaacaatctataattttttcactcgcggcgagattcgcgcccaaacttcctttcacacgaaaaaaccaccgtccccggagtaccaaatcctccaaaaacagtgatttccaaatgcgcgatcaggggttcgaaccctgaacgcggacgctgaaatcccatgaataggaggttttgcacactatctggtgtgagtgtgttcatgggaattggtggtaaatattgcttataaaagtacggagcatagcggtggaactcgaggaaatcaaaccttgcgaatagagcatttctgtaaattgattttaggagtaatcaaaaatatcaagaaaagataagagcctcatcacaccttagctataactctattgtttcaataaaattattaattgttaagtcgtccggaacatcttgcactattgtaaataattctgctattttaccatgaatgtcatttgaacttatttttaatttttctttacttacattattcaacataatccataataaataaaaattctgatttgttttactttgaacatttgtttttttatgcattatcaattggttaaaattttcaaaatttttgccagtaagtatttgtaacttttcaaaaaataaatgtacttgatctactgaatccaaaaaacctaaatcattgttcctggttaagttatcaagtaacgaagtaatattagatttcttattcattcttgcatttattcttttattacgaataaagatattgacaatttctgatgccttaatattattccttgttctataatcaatataggctaacgttgtcactaattcttcatttttcatacgcttatcaagtggttttaataagttttctgaatattcgttggttatagatttaatcttatcaatcaattttttatctatataagcattccacatttcaaatgtattaggaagaattgtataaggctttgaatttaatcttaaaaaaagatctattggagaaaaattttgattattaagttgattaatctcaacaatatcaataggaaaatctagtattttatctattaaactattatcatattcttctattctctcacaatccattccattaagttcctttaaaattcttagtttagacagtttatacttatgaataattgactctttaaatttgccatcttcatctttatatacctcccctaaaaatcctattatagccaaaagacgttgttgcccatcgataacctcatatactttgtcttctcgcttatagataaatataggcggaatcctaatatctaaaagaatactttcgagtaaatatgatgccttttgtttattaatagtttctgatctctgatattctggtcttattaaaaactttgattcttttatatcttgcaatatatcgtaaatcgatgaagaggccgggtctgtcttagttaactgaaatgtatccatctgttctttttttatatcgattgacataatacgattaaattctacagagtttcttaaattatcatcataatttatttcatacagtcgctttaataaattgcttactagcaaatgtctattaacaaccgacttataataatgactacccgattgaacaaaaatctcctctatatctatgggctcatcaattcctttccaaaccgaattgtcttctaccgtaattgaagaaaaatctttggctaagtctttgcattttattttattcaaaatagacttatccttcatatatataattgcaaaggcccagaaaaaaacttcatacaccaatatattttctgccagaaatgtgttaaacttactcaatgaatttttaaagctcgtaagttttttaattaagcatctatacatatcaattagttgctttgagtcacaatctttaaatttttcataataataagttttaatacaatcaacccttgattttgccctagcatagctatatataggtatatatggtaaagttattaaaaacctaattcttgataatagataattaactttgtctctcttttgcatattatgttttctttgaggaataaagagtgctgtattctgttctaatagatcggaatctttattaagaagaacttttagttgctttgctataatatcattaatatattcagccctttcaatttcttgggatttaagggccgtaattccagaattgtaccttctaaatatttctttttttactttatctttttgtaattcacttaaagcaggttcgttgacaacattgaaatttaatatacgaattttcgtatttctaaaggtttctttaacatcatctggtaaattaatatatctcaatccagctagaccagtcaaagcttttaatcctttttccgttaaaacaattttgtcctccaaaaatctttttatcgtctcatatctttgtcttccatcaataacctcttttctattaccattctcaaataagactatcggcggaacttcagtacccaataaaatgctttcaataaaataagttgctttgtcttcatcccaaacatattttctttgataatacggagcaaaatctacagattttgaatatctctcattcaaaaatgtatgagagatagatttcactgtattctctactcttaaactgtttttaaaaacaccaattatgtcgtcgcaattcatctcaaatgctggcatagctaacctcctatatgtactctctcattaattatttgctctttaaattttggtatctctttactaataacagagccttgataaaaatactcattattatacttaagccgttgttttaccaacccatccacagcaaagcgaaacacgtattgccaactcaaattttgaaaagagttaaccacctgatcaatggatggcatccaatcataaatatacctgcactcgtcaaacatcatagcatctaaatacataattgtatcttttgctctatatgataaacgattagttaatttagagacatagtgcatggggtatgctaattgattaattgataagtctaaaaacagaccggaggttggaatatcaagaaactgatacagttgctttttttgcaaattctgaatcgattcacttagcttaggtgttaaattactacaatttctcacttcatcgactatttgcatagaccttaaaatattaattccaccaggaaatagaccgcctatctcattcaacaacgtattaaacttattatccactaagttatttaatcccttatgttttaaaaatgaattgcttgcaagaaacttatataaagaattattctttatctgattaacttcttgtgcagatgtataaagcttttcgggaggcaataatgaaataaaatatttccaaaattccgaattagtgaatcttaaactagatgatgtaactgaggcgatatcacataatagtgatgttataaactcgccataataatattcaatgttttcttcaatttcttgtagctttaagtcgttaatttcttcaaaagatctgctagtactatcaattatctttacattagggttagtttttgtcaaaaagtacctagccattaattctgtatatatagatatctcagaactatttgttttatctaaaccgccaaaattagttattaacattcctggagagtttagccgatggtatttaaatagagtagaaatacatcttagtgcatgcttattagaaattacagttccacaagcatctatgtatacaatatcaaattttttgggagtatgcgcaaaaaagttctctatagacattcttataattttaggttgagcaaaattggaattattgtaattctctattgcaacactataaatatctttatcactctcaaaggcccaaatattttgtggtaaaatcccgagagaaattaaaacattaaagtcattctgtggctctggaccagccaagtaacaaatattcaattcctctggttttttgtatcccacttcaattcttcgttgtctttcccactctttgatataattgatatctatcttctgaacttcttcaaagtctcgtccatcatttttatcacaaaaaaattcataaatatctcttacataatattcacttaagcaagccgcttcatttctattatccgttaatgcttggactgcatgtttcaaaataatatttcttgatcgattcttaatgtattgatcgtaaatcatttattttatccctaagtcctcttatttttattcttttggaaattttatttttttagaagtaacaccacatatataattcatatctacattataatattttgccaacttaatgatagaatccaaaggaattctggttttacctaattcataatcagcatatgttctctgtccgatattaagtatttcggcaatttgtttttgagtataatcattatcttcccttaattccctaatccgtttaatgtatctcatacgatatcaccccttttaatcatattgtatcttagagcaataaactctattgacttttagagttataaactctataataatgggaaaaggaggtataatatgaaggatattgaatatggcaaagtaaatctaaaacttggtgatataatgaaaaatcaaaatattagtattaataaattggcatttcgttcagaaatgcaaagaacacaattaaaaacatatcgagataatgccgtacagcgtgttgatcttgctatattagctcgactttgctatgccctagactgtgatttaaatgatttactggaatatgtaccaccacaaaaaaagaaataatacgacgaaagagatagcagttttcaacctgttgtccctttcgtttttttcaatcaagattgtaccatttatacacgtagtatctttccagttcatgtgtacctgttattttttccccatcccaacttacagtataaaacttgtcatcatctacccctatatctatagtcatacttgaactacctaattaagtgacagaaatcatagaactctacttcatggcttttaaaacgttccattattacctgccttgccctatcttctgactgtaagtaatcatccgtcacatcctcgccattgctgtatgcacatactgtctcattgttgaactttatagaataactcctgccatcaccccctacttctattgtactgaaagaaaaagcaaacatcacaacgattagtataatctaataatgcgctaattttttaatcccatcacctcctgtctctacttcacaacatattttaagcatgattccagtatgtgaattatgcacactaaatatatcgttcataatattatctaatcaagcacattatttttgtataaaatagtgatatgtattaaaccttggaaggggaatcgtcatggaatttgaaaatcaaatacttaaccgaataaatgccctttgccacgaaagaaactggacgacatataaacttgccaaagagagcaatattccctatgcaaccttaacccatatgttaaagaggaatactgtacccactttgcctactcttgaaaagctatgctgtgcttttaatatttctttatcacagtttttctactctgggaaagatatcattgaattatcctctgaacagcttgaattgttagaatattttgatggatgtaatagtgagaaaagagaattgattttgaacattgcgaaaagcattaatgcacttaaataagtttgctacaaagttatttagtaaatggactatttatttcacctcgcctccagttcgcccccaattctgcctcataaccttgtcttataactcacactggactttcttaggtgcacttccctctttccgccccaaactcttgcaatcccctattcatgagcatttacacacgaaaaaaaccaccgtccccggagtaccaaatcctccaaaaacagtgatttctactgcgcgatcaggggttcgaaccctggacaccctgattaagagtcaggtgctctgccagctgagctaatcgcgcgtttccctatgctgccgcagatgagcctgtcacctgtgacgcaagggttattatataatatcgactgccaaattgcaagccctttttacaaatttttttcagcttttttacacaaaatctatttcaggtaactgtcccgtctgttcctgaccggttgtgattccggcaaaaatatgtcttgccattatcacgatcccggcggtcacaataagcgtcgcacctatgaccacatacggcatctgtccaagcttatcaaacagtacgccgtacatcgcctgccctgcaggctgcgcgcacatggatactgccattgccattgaaatgacttttccgacgagatgcaccggagtgacttcctggacgtaggcaagcatctgcacgctgaacatggtggctatcatcatgatcatgccgtagcagagcgtcattacaatgtaggctgccattacaggtaccggcgccgcaagtaccgctcccatgggaagcagaacgaatgaggcccacagaagaagcttccatgctttctgtatcttaagctttccggccaatacaccggtgagcacgcctccgatgagcccccctgccgccccgaatccctgagcgtatccatagagctggctggaaagcccaagataaatcttaacgatgaccgggatccccacaataataagagaggtcagaaacagattgaaaaatgcgattaggaccactacttttttgatcaccggctgttccttccgtatatagttcagactgctgcccatatcctgctttacggtgccccatatgctgttttgcgcgttctgtctcacgtttggtatcttaatgaagatctccatgaccgcggacaggaagaagcagacacatccggcagccactacaggggtcaggccccacacgccgtacacgataccgccggccaccgggccgagaagcccggaaagcgcgttgatctggttgatgatcgcattggcagtcacaagattttctttctcctgcagaagaggcatgctcgcctgaacagaaggctggtatacagcctggatgccggacaggacgatcatgacgatagtgacaaggatcaccggtgagtacacgttgactccaagcagaaataaaatcgtcagtaacgccgtaccaaaatccagcgccaccatgatatttttcttgttgatcctatccgccagcagtcctcctaccggcgacagcagtgccatcggtatgaaggaacatgccatagccgcgccaaatacagcggatgaccctgtcgcatcgagcagataaagcggcagcgcaaatcttaaaatactgttcccaaacagagagatgatctgtccgatcacgactaatacaaagtttctgttcatcaatttcattttcaaatctccttttcatacattcgtttggtatgtatattgctaaaatatatgcggcccaaatatttcagaccgcttttcctcagtcgagtacctttctcatatcccggaccgcatctctcacttcctcatcgatgatcgtaaggcccatgccgttcagcaccttctccagacagtgcagcttatgctcaaacttttccatatttcccgtaaacacaagcgggttgatccatatatttgccagcagcatcagcacctctgccgcctcttccgggtattctacgttcagagaaccgtctctgttaccctccgcaatgtaagcagcaatgatgggagcgaattcttccacagactcatggacttccatggccaggaatttgggattctccataatggtcggcgcggacttcagaaatcttctctggtccgtactctttacacaatacagcacgatctgctttatcttctcccggcctgacatattttcttccccgtcatacatggaacggaagtcgacgcctgcgtgtattctatcccccacggcctggatgatatcttcctttgatttaaaatgatgatatatcgcgcctttgctcagatcgccaagttcgtctacgatatcctggatcgtcgtattttcatagcctttttctaaaaaaagattcatcgatacatccagtatacgctggaccgtcacttcaggatacttatttctcgccatcttttcgtacctctctgcaaacactcatacattcgtttggtatgtatatattatcaccgctcttttcgtctgtcaattacttttcatattttctttgtttcttcatatattagtataaggaggacaagttgctatgaaaaaactatatcacaaggcagacctgccgtacataacagcagttgtcgtgctcggatgcctgaatcattttatttacgagtggaccggcgaaagcccaatatccgctcttttttgtcctgtcaacgaatctgtatgggaacaccttaagctgctgtttttcccctacctctttgtgatcacttttgtctatttttatgagcacaggacttccctctcccgctatttttgttcccggctgctcgccgcactgctcggaatgagcaccataatcgtggtcttttatacgtacacgggaattgtcggacgaagctttgtggtgctcgacatccttatctttgtctttgctgtcctcgtctccttccgcgcggcccctttgttttaccggtgccatttctgcagagacgccagctccctcgtatttgcaggctggatctttgctgtcatctgtttctttttctttacgtgccagccgcctgatctgccgctgtttttttctccggcataaagtaaccggcataaagaaacataaattttagttttcatataccagtcccggatgtataatgttattagcggtttttgctttaatacgttacatgaaaggagtaggggatatgacaaacgaatgtgtcaaatgtaagatcgagcaccacgctgtgctttttgcatatcttgcaaaacacgccatagaactgtgcggggagaagggaaaagaggctgttctcgacggaatgactgcctacggcagggagcggggagcccggatggctgccaacgcgctggctcacggagatgaactgaccactatgacaaatcaggcatatggagaatggaagccggattatgacgggcagatggaattcgggcagctttgtacagagcccacactgcagacttatatttcccgctgtgcctggtgtgacgcgtggaagaaacacgggcttctcgactatggtaaatattattgtgtcaatgtagataatgcagtttaccaggggttccgctcagattttgtatgcacgcccaccacgactgctctgagctggggcggtgaacgctgcgaatttgactggggacatccgctcacaagtgatgaggtgaaagcactggcggaaaagaagcaggcgcttggcacttcctgtatgaaggactttaacttccacaccgcccatctgctgcacacggtcggaaatacgctgaaagaacagcttggcgcgcagggagaacaggctgtttctcttgccctgtcggattatgtcggcacgtttgggcaggcgtatcttgacgtattggaaggagtggacgatgagcaattctgatcatatcatcgcagaatggatcgcaaatcacgaggcttccatagccgccgtggctgactatattttcctgcatccggaaaccgcgtacaaggagaagttctcctcccggtgtctggcagactttctggagacagatggttttcagatcgagtggaagacagccgggatcgagactgcatttaccgcgtcatggggatatggcaggcccgtcatcggctttctggccgagtatgacgccctggccgaaatcggccatgcgtgcggacataatcttctcggaacaggcgccgcggccgccgcatgcgcactgaaggcatatatggaggctgtcgaaatggaagggacgctcctcgtgtatggctgtccggcagaggaaataatgtccggcaagatcatcatgaacagccagggagtgttcgatgacctggatgccgcagttacgtggcatccttttgacagcaacagagtgagcaacgatatctggcagtcacaggacatcaaaaactacatcttccgcggcatgagcgcccatgcctcccgttcaccggaagaagggcggagtgcccttgacgcggccgagctcatgaatgtaggcgtcaattacttgcgcgagcatgtcccgcaggatgtccgcatgcattatgcctacatagacaacggtctcccggccaatgtcgtccccgactacgcaaagacaaactactttatccgctccgcgaaacgcgcgcgcaccgaggacgcgagcagacgcgtagacgactgcgccagaggcgcggccctcatgaccggaacggaagtggagatcgaactcgtcggaagctgcaaggagatgaaggtcaaccgtatgctggctgaaatatattatgacgccatgacacgcgttcctgtcccaacatacacggaagaggaacttcagttcgcggcctccatcagccaggaggcaggtctccagaaccacggcatatactttcagggcctggaaccgctggaaccggaaccagtccccatttccatcggcaccgacgtatccgaagtaagccataccgtcccgaccatcacactgagcgccgccgccatgtgcaaaggcacacctttgcaccactgggccgccgccagacaggccggaatgagcatcggaaagaaagggatgctctacgccgccaggtgcatggcggaagggacaaaacaattgcttgagaaaccggaacacatacaaaacgcctggaaatatcacctggggacagggtaaaacctaattggggacgtaccctttttaaatttcccccgtccccaacgtcaccaacgtcattttaccctgtccccaatggaccaaagaaaggagaaaatcatgatcactaagaaaatcggtattatcggctgcggcaatatgggtggcgctatcctctacggcgccttgaaaagcggggtcctccccaaagagaacgcctatgtatatgacctcaatcctgcgatgatgaagaaggcgcgcggatggggcgttaatctcgccaaggatgacgaggatgtatgtaagaacagtgacatcgttctgctggcggtgaagccgcagaacgccgccgaggctctcgcgcagtgtaaggacgcgctggacggcaaggcaatgatgtccatcgtcgcaggtgtgacggtagaacggctccgcgccatgataaacggcagcttacgcattctgcgcatcatgcccaacacaccggccatggtatttgaaggcgcctttgccctctgttctgacaacgacttttcagaggaggaactgcaggaagcgcagcagatctatagttccatcggcgtcgtggagcttgtgccggaggttctcatcgacgcggtgtgcggcctgagcggaggcggaccggcctacgcggccatgttcatagaagctatggcggatggtggcgtaaagcagggccttccccgcgcaactgcctaccggcttgcggcacagacctgtctcggcaccgcaaagatgatcctggaaatggatatccaccccggccagttaaaagacatggtcacctcaccggggggaacaacgatcgagggctgtgaggcgctggaaaaaggcgggatgagagccgcggtcatggagtgcatcaacgcaggtaccgagaaatcccgccggctatgatattgcacccttgaccaggcgcagaagcatacatataaaaggacatgaaaaagcagcggccagcccccacgggctgccgctgcttctttatgcctattctattgaaccgttccgtcctgctggcctccattatcctggccgctctgtccgtcctggtttccctgtgtgtcctggccgctgccgggatccgcatcctgcggatcatctgaactatcaccaggcgccgtatcaccggcatcccccgcatcagacgcgtcatctgcagaatcctgcgtatccgcatcatcggaggtatttcccttatcggaatcgtcagacgcgtcatctgcatcatccccgccgaaaagattcttgaagaaattcacgatcttatcccagaagctctcgccgtcaccggaatcctttgactttagcgcatcgatcgtgctgtcgatgaccgcgttatccccgagaatgctgtcattcgtgttatttatgataccgccgtcactgtctcctcctgtgaaaaatgacttaatggaattccacaggttggagaagaaaccatcgctctttccttccaggttctcaagcgtctttttcagcgccttcacgtcataatcatactcggaaatactcttcatgagcgacacgatctttgccttctggtcaccgttcaatgtcacattcagatcatccgccgcatcattgacagcgccttcgatctcatcctcatctttgagtccgtcttctatgacctcctgcttcacctcgttcatgaggtccgccgcttcctgctggccgatcgactctgccagctctcctgtcgtgacaagctcttccgtggcagtcgccttctggtcttcgctcagctcttctccgctcgccttctcatatgccatcatgatccctgtaagcgctccggttccggacacctcgatcggagagccggccaccacattacagttctccacccctgaggtaagaagtgtacttgcgatcatggaactcgtcacaaaggtaaggttggcaaccttcacctggatcccgccgctgcctgtcggctccacataagaacagctgtatgtcctcgtaccgatctgcgcctctgtcgcgatcccttccatatactttctctcatctgcatttgtaacctcgatcgtgtcgactttatctgcagaagtgccaaaatagtcatacatggctttcttttgctcctctgtcagattcgctccgagcgttacgaccttggaactgtccgcctttgctgtaaacggcacactgacaaaggtcagcaccgccgccatcatgaccggtataatttttttaaattttttcataatagtctggtgtaaccaccatacccccttttcatcaattatttacatcttaataataactaagctcccacataatataacacattcccggacatttgcaaagaaacagccccttaactatttctgaatattttctgtattctctcgtggaatacctcctcatcgataattccccgcatcgtccccactatcctgccgttcttaaaacagatgaacgtcggcacgatctccgtgtcatactctgccgccaaaagttcagactcttctatctcaacctcgcagaactttattttttttctatttttatatttcttctctgcctcttccgcaattggtttcatcatggcgcatttaccgcaccagaccgcataaaacattacaaccaccggaagactttcgtgcatcacttccgaatcaaaattctttgctgttaaatgtagcataagtttcaacctttcttaagccatctttatgtcagcacttgggattcaatattctgcatacctcatccagtgattttttaatacaggcaagtttttcattcaggttccttttgcgataagtgatttcacacaatttatgcttccatcctttctttccgcgtcccacatgctcacatcctgaccattattcttctttatattatatgcagctgccgccttatgctttcctgacagcccgcaacttgcagataggattccctgctgccgagaacttctcttcatattccgtcatgacatttccgcggttcatggcctcatcgccgtgcaggtcaaaggtgcgctcttttatctcccacacatccgactccctgatctcctccagggaaaattcaaacaatcccctgttgtccgttttaaactccaccacaccgtcacaagccagtatcttatcatatctggacagatattcctttgatgtcagcctccttctggcatgtctcgccttcggccacggatccgagaagttcagatagatcccggacacctccccctttgcaaatacatctgcaatgtccgctgcgtccatacagataaaccggatgttggcaggcgcctgcgtctcccgctccatatatttctccacagcccgcagaagaacactcgagtaacgctcgatcccgataaaattaacgtccggattctgttctgccatcgtcagcagaaactgccccttccccattccgatctctataaatacaggattttcattcccaaacaccttgtcccagcatcccctgtaaagagcaggttctttcatgacctctctgcacgctttcagcacactttccgcccggggtatatttctcaatcgcatatgactgcctcctcattttttgctcttatccagtctatccatttcttttaaaaatgtcaattaccgttaatttttcaatttgtttacttttactatggaaatttagaaaaataagtgtattattaacatataatacaaattatacttattagaagtaagcagaaacggaggcgtagtatggactctattgtggagaaattatcagacattgagacgactgctgaagcaatcgtagaccatgcagaagctcaaaaatttgagatcgaacagcagatacaggcccggcgcgacaagtttgatgaagacctggaagccgatacacagaagaagctggagcgcatccgcgccgaggcttccgagaaagtcgaccggatactggagacacagagacagaaaaacaggtcgaccatcgaagctttagagaaagaatataaggaaaaccatactgcgtatgcacaggaaatcctaaaacgtataactgaggtgtagaacatgggcaatcttatggcatacagcggaattgtaacaaaagtacgggccatgcaggcaaagctcctcacaagacaggattttgagaatatcgcctctctcaggagcgttccggagattatttcttatctgaaagaaaagcccgcctacgcagatttgatgaaccagatggatgtatctctgtaccaccggcggcacgtggagaagattctctatcagtccctctatgatgactatacgagaatctttcgttttgcagggctggaacagaagaagttcctgaagctttatctgaaaaggtacgaagtggatctgatcaattactgtttccggatcgtatttaaccactacgataaaccatttgacctggattataagaaagaattttttgataaatattcacagatctccatcgaaaagctcatcacgtcgcgcagcatcggcgagctcgtggataatctgcagtcaacagagtactacgcgccgcttcggaagctgcgggattcaaacgccgccactttgtttgactatgatctggcactggaactgtactacttttctactgtatggaaaaaacgaaaacagatactgacaaacaaaaaggaactggagatatatacaagagactgcggtactaacatggatctgctcaacatacagtggatataccgtgcgaaaaagtattaccacatgcttccgcccgacatatattcgctgacgatcccgaatcactaccgccttcgtatcgatgagttcaaagcgctggtggaggcacctaccctggaagaatttgagcatctgctggaaggcacttattatgccaggaaatatcatatcgacaacagcaagacgatggaacagctgtataaggaatgcctcatgcatctgtatctgtcggaccggcgcggcaatccgtattcgattgcgactatcaccacatatctgttcctgaaggaagaagagatatataaactgacgactgcccttgaatgcatccgctacggcctatcatcaagagagacgttaggatacctgggaggtgtaattcaatgattgtaaagatgaagtttttgagcatcagcggaccgcggaccgacattgaccgcgtctgtgatgtctacctttcaaaatatgagatgcagcttgagaatgcagtcacagaacttaagacgaccgacaatctcctgccgtttgtggagatgaacccttacaaagaaccactcgccaaagcagaagaatttacttcaaagctttcggcggcaggtactcctgccgatacggcgttgtccacagatgagatcatcgccttgatccgtgaggtgaaccatgactatcttgagctgcaggagaaaaaagagctgctcaaaaaaaataaagatgaactgctggaaaagctgcatgtattagaaccgttccggccccttgatttcgacttgcacaaggttctccattatcggtatatgcagcttcgttttgggcggatcgggatcgattattaccggaagctggaaaaatacctgtttgaggatctcaacgccatttttctggaaggcacgcgggatgagaatttcgtgtacggctgttactttgttgcaaatacagaggccagcaaggtggattccgtattcaactccctgcactttgaacgcatcaccatatcggacgaatatatcggctctcccgccgtggcatatgagagcctggagcaggacatttccgatctggatgagcgcattgacgaaatagacaaaaatatccaggaactgctcgacgataaggcaggcaaactgctcggagcccgcaagcgtctggaggaactgtccaacaattttgacgtccgcaaaatggccgcccgcgtagatgacaacaaggaagattactacattctctgcgggtggatgggtgaagatgatgtggcggcctttctgaaggaatcagaaaatgacgacaaggtgttcgtcgttgtggaagaagaccgcgagaaattcttcggcgaacctcccacaaagcttaagaatcccaaattcttcaagccttttgaaatgtttatccgcatgtacggccttccctcctccaacgagatggatcctaccgtattcgtggcgctgacctatacgttcatcttcggcgccatgttcggagatgtcggacagggattgagcctgttcgtgataggcggacttctctacaaactgaaaaatatgaaccttgccggtatcatatccgtcgcgggccttttctcggctttcttcggatttatgttcggcagtgtattcggttttgaggacattatacaggcccactggcttcggccgatggaagccatgacgaaccttccgttcatcggacagctcaacaccgtatttatcgtggcgatcgcctttggtatgggactgaatatcctctccatgatatttcatataatcaatgccatccgggcacatgatacggaaaatatctggttttccacgaacggtatcgcgggacttgttttttacggatttatcgtgttcacaattgtactttttatgacgggacatcaggttcccggaaatatactgatggtcatattcctcggaatacctgttctcgtattcgtatttaaagaaccgctcaccaacctggcggagcgcaaccacaagaagctggagacaggcaaaggaatgttcctcgtacagggattctttgaattatttgagacgcttttgagctatttctccaacacgctttctttcgtccgtatcggggcatttgcggtgagccatgccgctatcatggaagttgtgctgatgctctcgggcgcgcaggaaggctccccaaactgggtcgtcgtcgtgatcggcaacctggtcgtatgcgctctggaaggactgatcgtaggtatccaggtgctccgtctcgaatattatgaaatgttcagccgtttctataaaggcagcggccgcgagtttaaaccgttcaataatcataaaaaacaagataaaaattaatccatatccaaggaggagaaaatcatgtcattaacagtaaaattattattagtcgcagcactggtgctcagcattatcattcctttcggttactatctgatcggggaaaagaacaaaaaacgctataaaagagcagtcggtaccaacgccttcttctattttggcacatttgtcatcgcatcgatcatgatgttcggcggcaatacagctgtcgccgcagataccgctgccgctgcctcttctaacgccacagggttcggttaccttgccgccgcactatcaaccggtttgtcatgtgtgggcggcggtatcgccgttgcgagtgccgcaagcgccgcgctcggcgcgatcagcgaagattcaagtgcactcggaaagtcactcatcttcgtaggtcttgcggaaggtgtctgcctgtacgggctcatcatctccttcatgatcttaggtaaactgtaagatgaagatgtatttgatcagtgataatatcgataccctgacaggaatgcggcttgccggcgtggacggagtcgtcgtgcacgaaaggaacgagcttagagaagccatcgaaaacgccatgaacgacaagactgtcggcatcatcctgctgaccgaaaagttcggccgggagttcccggatctgatcgatgagatcaagctggagcgtacaatgccgctgctcatagagattcctgacagacacggaaccggacgtaaaaaagattttatcacatcttatgtaaatgaagcaattggcttgaaattataaaaagaaggtgacccgcgtgacgttagaagaaaaaatatcacatttacagtctgctgccatggaagaggccagggcgcagggtaatgcaattataaagcagcatgaagaggcgcttctaagcgtctttgagcagcaccgttcagaagctgtccggcagtccgagacaaggcttaaggcagaggctaccaatgcaaggcagcagctgaatatggccgcttccaaagctcagctggaattgaaacgagagctgagccagacacagaaagaacttaaaaaccagcttttcgacgaagtccagacactgatatacgacttcatgaaaaccgatgattacaaacggcttcttatcgcatatatcgagagcgccgccaaattcgcaaacggcgaaacgatgacgctctatatcaacccgactgacgcggataaagcagcataccttgaagagcatacaggaatgactctgaccgtcagcaaagaagactttatcggcggcatacgcgccgtcattcccgggcgcaatatcctcatagaccatgcgtttaagggagccatagacaatgaataccacaaattctcattcaagggaggtgcgggaattgagtaatactggaacgatctacggcatcaacggtcccgtcatctatctgaagggaaaaacagattttaaaatgtcagagatggtgcacgtaggagatcagaaactggtcggcgaggtcatagccctcgacaaagacgtgactaccatccaggtatatgaagagacatccggcctgaagccgggcgaatgtgtagaagctacaggttccgccgtatccgtcactcttgcgccgggcattctggacaatatatttgacggcattgaacgccctcttgagcgtatcgcagacaccggcggcgcgtttgttacgcgcggtgtgagcgtcaatgcgctcgataccgacaaactgtgggatactcatatcacggtcgcagaaggggatatcgttcagggaggcactgtcatcgcagaagttcccgagacacgtgcgatcaagcataaatgtatggttcccccggacgtgtccggcaaggtcatttctgttgtacctgacggaagctatacgatcagcgatacgctccttacactggaacttcccgacgggacacaaaaagacctgtccatgacgcagtactggcccatccgtgtcccgcggccggtgcaccaccgctatccggccagcgttcccctcataacgggacagcgtatactggatacgatgttcccgatcgctaagggcgggaccgccgccatacccgggggcttcggcacaggaaagacgatgacccagcaccagatcgcaaaatggtctgatgccgacatcatcatatatatcggctgcggcgagcgcggcaacgagatgacccaggtactggaagaatttggtgaactggtcgacccaaaatccggaaatccgctcatggacagaacgacactgatcgccaacacgtccaatatgcccgtggcggcgcgtgaagcctcgatctacacagggctgactctggcggagtattaccgtgacatgggctatgacgtcgccataatggcagactcgacctcccgctgggcggaggctttaagagaactctccggccgtctcgaggagatgcctgccgaggaaggtttcccggcatatctggcttcccggctgtccgctttttacgagcgggccggtatgatgcagacgctgaacggcagcgtaggttctgtctccatcatcggggccgtttcgcctcagggcggtgatttctccgagcctgtgacacagaatacaaagcgttttgtccgctgtttctggggacttgacaagtcgcttgcctactcacggcacttcccggccattcactggctcacaagctacagtgaatacctgaacgacctgagcggctggtactcagaccacgtctcacccaagtttgtggactaccgcaaccggatgatggcccttctgaaccaggaaagcagtctcatggagatcgtaaagctcatcggcggtgatgtgctccccgatgaccagaagctcattctggaaatcgccaaagtcatccggcttggctttctgcagcagaatgcatttcacaaagacgacacctgtgtgtccatggagaagcagttcaagatgatggacgtcattctctatctgtataagacgtgccggaaactagtcgcgatgggcatgcccatgtccgtgctgaaagcagagaatatattcgagaaagtcattgccatcaaatacgatgtgccgaacaataacctgcagctgctcgacatgtataaggtagacatcgataatttctataacagagttctggaaaagaacgcataaaggaaggggttcacaatgggaattgaatatcttggtctgagcagcatcaacggccctctcgtcgtcctggaaggcattcaggatgccttctttgatgagatcgtggagtttgtcattgacagcaatacaagaaaaatgggacgtatcgtagagctctatgaagaccgggcagtcattcaggtgtttgaaggcacggaaaacatgtctctgcagaatacacacacgaagctgacagggcatccgatggagatcgccgtatctcctgatatgctcggacggacctttaacggtatcggtcagcctatagacggacttggccccatcgtgtccgatgacatgagggatgtcaacggcctgccgttaaacccggtgcgccgggaatatccccgcaactatatccggaccgggatctcggcgatcgacggtctgactactcttatccgggggcagaagcttccgatattttcaggcaacggcctgccccatgaccagctggccgcccagatcgtaaagcaggcatctctcggagataattcagacgaacagttcgctgttgtgttcggcgccatgggcgtcaaacacgatgtagccgaattcttccagaaaacatttgaagaaagcggcgttgccgaccatgtatgtatgttcctcaaccttgcaaacgatccggtcgtggaacgtcttatcacgccgaaggtggcgctgacggttgcagaatatcttgcctttgaacagaacatgcacattctcgtcatcctgacagatatgacgtcctttgcagaggccatgcgtgaagtatcctcgtcaaaaggagagatcccttcccgtaaaggatatcccggatacctgtacagcgagctggccaccatatacgagcgtgccggcatcatagagggagcaaacggctccgtgactcagcttccgatactgactatgccgaatgatgatatcacgcatccgatccctgacctcaccggatacatcaccgagggccaggtcgtactcgaccggagcctgcacgggcaggcgatctacccgcccatcagcatcctcccgtcgctgtcccgtctgatgaaggacggcataggagccggatacacccgggaagaccatcaggacctggccaaccagctcttctcagcctatgccaaagtgggcgaggcgagaaacctggcatccgtgatcggggaagatgaactctcaccgatcgataaacagtatctgaaattcggtgaagaatttgagcaccactatatcggccagggaccgaccgagaaccgttccatgatagagacactcgatctcggctggaagcttctggcgcttcttccaaaggaagaacttgaccggatcgacacgaagatcatagacaaatactatccgggcgaggcagagtaaggggggaattatatggatccgcgggaatttccgaccaaaggtaatctgatgctcgccaagaactctctggcgctcgcccatcagggatacgacctgatggacaaaaaacggaatattcttctcaaagagcttatgggcctcatcgatgaggccaaggaaatacaggaagagatcgactctaccttcacacgggcatacgcctgcctccagcgggccaatatagagcacggcatcagcatggtgcagcagcttgccttcaccgttcccatagaggactcgatccgtatccagacacggagcatcatgggcaccgagatcccctatgtaaaatacgacgcaaagcagaacgacctgacgtactcgttcagcaccacatatgagtccattgatattgtgcgcgaggccttccgcgacgtaaaagaactgacgatcaagctgtccatggtggaaaacgcggcttaccgtctggctacgaatatcaagaagacacagaaacgggccaacgcgctgaagaatattaccatcccgatgtacagcaacctcgtatatacgataacgaatgcgctggaagaaaaagaacgggaagaattcacaaggctgaaggttattaagaaaatgcagtcaaaataatataagactaaaaggatgacgctgccggcagacggtaacgtcatccttttatatttacaactctccaaaaatttgtcttaatttagaatattgacaaaagaaagcacaggagttaaaatataagaaataccagtgatatattactgatatctttttgagatttcacaggaatataataagcaggtcaaggaggaatgtacgggtggggaagcgaatatccatgacggagaaagtgctgcaggaactcagaaatgagatcgtcaactggaattacgatgaaaatgatatgatcacagaagcggaaatttcaaagaagtatggggtgagcaaaacaccctcgagagaggcgctgaattgtttatgcatggaaggactgctcgaaaagatacctaacaagggatacctggtcaaagggatatccgtcacagaacttcaaagtctttttcaattcagagaaatattagaaaaggcttctgccgaaatggctatccattatgccacggatgaggaactgaagcatttaaaggagcatacaaaagagcagatcagcagaattgaaggcggcacttaccaggaatatagtgaaacaaatatgcagtttcatatgtcagtcgcatatctctcccgaaaccaatatctcatatcatctttggaaaacatactgaataaattaaggagagtattagttaaggactggcgggtatcagaggccaaaattcttatggcagagcacctggaactgacagatgctctctgcatgagggatgtagaacgggcaaagcagtctattgaaaaagagctgggcggtgtaggataccggttatattttcaggaaggaaaaacattttagattttctgccatagtctcagcctgttattttatgcttgcgaaaggaggattatttagatgaaaaaagtattgctgctggcgacgggcggtaccattgcagcgcgcagaggcagacaaggcctggctcccgatataaattgcggcgatttcctggatatgattcctgagatgaagaaaaattttctgatagaaagcagagatatcctgaatctggacagttcaaatattcagccggaggagtggcagtatattgcaggaatagtcacacaggcgctttcagacttcgatggagtgatcatcacacatggaacagatactatggcgtataccgcatcggcgttaagttatatgctgcagaatctgaagaagcctgtcgtcctcaccggcgctcagattcccattgagcagatgttcacagacgcaaggagaaatctgcagacagcatttgccgctgtggaagccgggatccccaaagtgatggttgcttttgacgataagatcatcaatggctgcagagctacaaaggtccgtactttaggtttcaatgcatttgaaagcatttccgcgaattatctcggggaagtgtacgcagacggagttcatctttatgataattttaaagtggaacatacagaagaaaagccgttctgcctgaaagaaaatttatgtccgaatgtttttctgctgaaattgattccgggaacaaatccagatatttttgagtgtctgctgaatatgggataccggggaatcgtgatcgaagcatttggcgcaggcggcacccattttgagagaaggaatctgatcccgaagcttaaaaagcttatcgatcacggagtttccattgttgccaggagtcaatgtctgtatgaaaaaagtgatttttccctgtatgaagtaggaagaaaacttttggactgcggtgtaataccagggagagatatgaccacagaagctatcgtgacaaaactgatgtgggccctgggacagacagaggacagcagcaaagtatgggacatatttaatacagattatgccggtgaaatatcactggaacataataaaacagcttgtatctaaaaatttcacaagagagaatgtaaggagggtttttatgcaggaacaagaaaagaagatagtgcagcaggatgcggttgatgaggaatttatgctggatgccgtccctataacgaaacggcgttctacttacagccagatcatggtatgggtcggatttggttatgttgctaccggcctcttcgtcggcggtacacttgcaggttatggaggggctcccgggctgaatccaggcgatgcgatcctggcaattattcttggcatgggcgcgctgtttgtgatgacgtctctgcttggtgtagcagcacagaagaccggattaaatctggcgctgatctccagatattcttacggcagcaaaggatttatcattccgatggcgatgatggcggtcatgacatttggatggttttccagtattgtaggcatggtagccgacatatggggcggcctgatcggaaatccttccggtgtgatcgtattcagccctgcctcatggggatatgaggctgttccggacattacgctggaagtgctgatcgcggttatcctatggggactcgtatttacatacagtgcagtaaaaggaatcagtgccattgaaaaggttgcaaagtttgcatgtcctattattcttatagtcgccatcgtagtaggcgttggaatgatgagagacggcggcggtttccacagttttatcaatcgtgcaaacgacctgggaggactcggccttggaacaggtatcacagcagtagtcggaagctggatcgcaggcgcggtcatgggtgtcgatatgttccggttcaacaagaatgtaaaggctgtctggatctgtgccgcttcctgttttatatttacgaaccctctgctgaatatcgtagggtacattggaagtgtgagtgttggacagtataattatgttgcatggatgatggggttaaatgtcatattcgcctttgtcggagtatttgcgtggacaacgtcattgtggacgacagataacagtgagctttactgtaactctttgtatacaggaccgattttagatgcagtaggcattaaggctaacagaaaagttcttgtaacaatttgcggtattcttggtacagttttaggagccatcggcttctatcaaatattctttgcaaatttcatcaatgttctgggagctatggcgcccccgctgtgcgcaccgattttggcagactattatcttgtcggacataagaaatatgaccatcgtcttctgcacaaacagccgaaatggcgttgggcgggaattatttcctttgcgatcggcgcggcgctcggttatatcttccagtacgtaacgacactgccgtacaatctgccggccggtctgttcgcaatgttagtttcactcgttgtttattatattatctatcgtttcctgccggataaaaaggaagataataagttaatagaaacattggaaacaaacaatgtgtaaaataaatatatggaaaggagtacattatgaaaaaggtatttttaaatgaattcagcgcattggaggtaaaagaattactggaacatgctgaggatgtaacggcgatcacctgctttggctcctgtgaaagccacggctggcactgctgtctgggaccggattatttcgttcctaccgaggtggcaaaaagagtggccgaaaaaatggataatgttgttgtcgttccatgcgtacctttcggaacatcgatccactacaatcagtatcccatgtctgtgacactccgctatgagacggagatcgccattgcagaggatatctttgaaagtctgatcaacaatggaatcaaacatatttacattttgaacggacatgacgggaacattccggctttggaaatcgccgcacacaatgtaaaagaccgccacagagatgcaaaattcctgtatctgccggactggtggacaaaagtaggaccgatcatgggagaacgttttgaagtatggaatggtctgggccatggcggtgagggagagacatccatcatgatggctgtacgcccggaacttgtaaatcttgaatacgcgaaaagccaggttcctgagaaggtaatagagatcaatgagacaacaggagttatctgggatatcaaggaactgacagagaccggagcaacgggagacccgaccaaagcatccatggaaaaaggagaacagatgctggatattctcgtaggactcgttgcagacgcgatcgaaaaaatgaataagactggatggacctattaggaatgaataaagggaccgtgtgatttatttgaatcacgctgtcccttatatttttactgccccttttatgtttaaaggctctcgaacgccactcttaccttgaactggtccccgtcgatctctacggtcatagttcctcccatgttctttgtgaagctctctgcgatcgccaggccaagaccatgtccttccgtgttacgggatttatccccccggctgaaccgctccatgatctcctcgggagagaagtccatctcataagaagcggtgtttttcaccgacacatatatctggctgtcttcccttccggcttctatatatatcctcgtccccttcagagaatacttgagcgcattacttatgatgttctgcagtacacggtaaagctttttgccgtctcctactatattgaggtctgcaccgtccactttctcacggatgaccataccgcttttggcaaccgcgtcctccatatctccgagtgtctgctccagaagcttcttcatgtccagttcttccagttccagattcacttccccgctcgtagatttggacaggtcaaagatgtcctggatcatattcttgagctgctcctgcttcagagccagcacatcgacatagtctctcgcctcatcgcttaacctttccttttttaacagatcgatatagcctatcatggatgtcagcggtgtcttcagatcatgagacacattcgtgatcagatcaattttcatccgttccgactgcatctgcttctccatgatccgctttaaatttgcgctgatactgctcagtttgcgggaaccttcatacagtaaagattcctcgtcctctatggcaggcgcgtttaattctccgtccgccatcgcgtttatctgtctcagcaatgatgcagtatctttgtacactttattatttctaaagcttttgatatagcaaatataagagacaaccgccagtacagtaatgacgaccactccaagcatatctccccaatacagcccgctgttccagacagcgccggccgttcccgccagacatatcgttgcaatgatcaggcataccctgctgttcagccgtatcgccttctcaaagtccagggcagctcttctgctctgtacaacattatagacgaccgatgtttttataagtcttccctgaagtatttttcttgctatcagcacgatacaacctgctccgatgagcgttaccggaaaataaaagcagacgctgctcacaactatcttaactctcgtaccgatccagatactgtagaacagatggcctccgaccacagaagaatgaactcccatgaaccagacccacagatcgagcaggagcgcggccgccagcacttccgtaccgactgtgtctatcctccatcttttcatatccttccattccttcgccggataaaaatgaaagaacagacagatcgctattataaagagcgctattaaaagaaagtaggtcagcttaaaccgctggttagaattccatcccccaaaccatctggatgtcacatatataccggaacatgccgccgcgccggctgccgccgccacatacaggataagcgctgcccggcccctgttagtcatatttttcaattttatagccaattccccacaccacctttaagtattttggatttttgggagtgatctctatcttctcccgtattctacgtatatgtaccatgacggttttctcaccggcatacacatcctcctgccagactctgctgtatatctgctccgccggaaatacatatcccggatgctccatcagaagttccagtattttgtattctgtggctgtaagctgtgccggttcaccgtcgaccgtcacctgctttgtgtttttatccagcacaagcccccctgtccgcagcactgcattggaatctgcccaggcggcggctccgagcgcaaaataccgcctgagctgagatttcaccctcgccatcagctccgccgtgttgtacggctttgtcacataatcatccgcccccattgaaaggccgatcaccttgtcactctcttccgtttttgccgaaagcataatgaccggtatattatttttctcccggatcttcataagcgccgacaggccgttcagctccggcatcatcacatccagtataataagatgcaccttatccgtcacaagcatatccagggcctccatgccattaaaggccttgagtaccttgtagccttccagctccagaagtttgccgagtgacctgacgatctctttgtcatcgtccaccactaataccgtatactgttccatcgttttcctccgcttcattcctgctgtgttctaaccataacaggaaaatttaagtttttatctttatatttttaacaaatttattaagattacatacgaacagaaaaagtcctctgttcagcctgcaccggacagaggacttagatgtttcattcttcttttatactcttctaatgttctccggttccccccgcacaatgtacagacagctgagcctgagccgccgcacagcctgcacaggtgcctcctcagtttccgccccatccgcagtttcatcagcacctccctgctgaatctggaaatcttctctgcactacagcttatgcgggaagaacggcattgtacttaaaattcaaatacggcaacaccgtacgcgggcagtctgtatgcaaaagaatatggtctgccgtcgcactcagacttgacggatttatatacgagaggcctctcctccccgcttccgccgtatttgctttcgtcactgttgagcacaagtttatactgctttctcttcggcacgccgacctggtaatcttcccgttccaccggcgtaaaattgcacacaaacagcagattcttcctgcagtctttggaatgtcttatgaagctgaagatgcttctctgcgcatcgtctgcatttacccactcaaagccttcccacgaactgtccatttcgtacattgccttgttgcgtttgtacagatgaagcagatccctgacccagttctgcatctgcctgtgttcctcttccgccagaagataccagtccagttctctctcttcgctccactcacgcagctgggcaaactcctggcccatgaacagcagcttcttacccgcatgccccatcataaaggcatagcctgcctttagattcgcatacttatctgctccgagcccgggcatcttgttgatcatggagcacttaagatgcaccacttcgtcgtgggagagaacaaggatatagttctcactgtacgcatagctcatggcaaacgtcatctggttgtgggcgcccttcctgtagagcggatcaagcttcatatattccgtaaaatcatgcatccagcccatattccatttcaggctgaagccaagtccgtcctcttccacatctcccgtgacctttggccatgccgtagactcttccgcgatcatcagcaccccgggatttctgcccagtacaactgaattcagatgtttgaaaaaatcaatagcctcaaggttcttgttgccgccgtatttattggctgtccactggccgtcctgctttccataatcgaggtaaagcatggaagctacggcatctacgcgcagaccatccacatgatactgctcgatccagaacagcgcatttgaaatgagaaagttgcgcacttcatttttcccataatcaaatatcttcgttccccagtcaggatgctccccctttttcggatcagcatattcgtaagtcggcgtcccgtcgaaatcagccagtccgtgggcatctctcgggaaatgcgccggcacccagtcaagaataacgcccactttatttttgtgcagatagtttatcatccacgcaaaatccttcggtgtcccataacgggacgtaggagcaaaatacccggtcacctgatatccccacgaaccgtcaaacgggtgttccgcgatccccatcagctcaacgtgggtatagcccatatctttcacatatttcgtgatttcctttgcaaattcacggtaagtatagaacccttcatcttcacgtcccagatggcgtttccacgagccgatatgaacctcatagatggacatcggctctttcctgtggtcccattcggcgcggttcttaagccacagttcatccgtccacgcaatatcgcttagatctgccactctcgatgctgttccgggcctcagctccgcataattggcatacggatccgccttaaagatatactggccggaataagtctctatacagaacttatacatctcgccttcctgcgcgcccggtataaaacatgtatagataccgagaggttcccccctctccatcgggttcgcctccatatcccagtcattgaattccccgacaacggtgaccgacttggcgtgcggcgcccatacggcaaaatacacaccggtctttttcccgctgcacactttgtgcgccccaagctttttatagatctcataatggtttccctgtccgaaaagatagtggtcaagttccccgatctcatatgatttctttctttttcctgccatactgccacccctcacaatcctgtcttaatatatgttcattatactttagacaggcataaaaagaaagggttttgacaaatgttgccctgtcaaaaccctttctttttctcttgtcagatcctgaaatcttcttctttcaaaatgattctgtcggaatcgtccgtgctctttccgaacacccttctggcaagatgcttcacattagccttctgggaatgcgaaatggcctcatccatgatatccttcacttctgcaactgtaactgcatggtcctctctctgcataacgtcgattctgctgtacagcgccaggattcccatctcgtcaagcttataaccgttttctttggcatacgtctgaccgaatgttacaagttcatcattgataaataccggaagctccagcctggaggtaaacttcttcctgaaatccggatttgccgtcagaatcctctcaagcggctttctctggtcctccagcacaaacagaagctcacctgtcttcttctccatcagatagtcaagttccttgactgtccttgaattcagctttccggccttctctatgatgatcgctccgccgcgcagcttctgtataatattggacagttcttttttattcagcgattcgccggtgacaatggcgactttcccctgctttaagttcctctgcttctggatcgcttttacgatatctaccgccaggacagtcttacctgaacctttccggccgatcacaagcaggtttccggtcttggatgtgccttcccgctgcgcccttctgtcattgtcgagcacttccacgatctgctcgctcattcctctgacaggtacaaagtatgaaaatagtttcttctgctcctccgtcagaccagccttcaggccaatctcgctcgttgcgctcaggtcataacgccctgtgactacaaaccctgtgtcaaacggaactccgccgcctttggacttcttgatccgcttctgaatctcctcctcggaaggctcctcgatcacgagttcctcctcctcaggttcatcagcctccgccgcgtcgtcatcgaagaaatcatcttcgctttcaaagtcatcctcttcaaagtcgtctccgctctcgaaatcgtcctcctcaaagtcttcttcgtcaaagtcttcttcctcgaagtcttcttcttcaaaatcttcgtcattaaaaccgccttcgtcaaagtcgtctccaccgaagtcttcttcatagctgtcatcggaatcttcgtctccgaaatcctcgtcaaaatcgtcctcatcgaatgcgctcccgaagtcgtcttcgtagtcatcatcttcctcagaatcatcttccatctggaggtcttccacaagatttcccatattttctaacggttcatcgtcttcttcctcaaaataatccggttcatccaccggctccggctcggcaactccgtgttccaactcttccataagctggcggatatcctccgtcatgcttggaactgtcttcttcgctttctcttcgtccgcttttctcgctgcctcttcctctgctgccttccggactgcttcctcctcagcttttctggccgcctcggcttccgccgcctttctcgccgcttccttctctgccgccttccgggctgcttcttcctctgctgcctttctcgccgcctcggactccgctgcttttcttgcctcttcctctgccattcttctggcggcttcttcttccgccttgcggaaggcttcctcctcggctgcttttctcgctgcttcttcttcggctgcttttctggccgcttcctcttccgccgccttccgggccgcctcttcttcggctgccttcctcgctgcttcttcctctgccgcctttctcgccgcctcggcttcggctgcttttttctctacttcacggcgctctgcctctctgcgttttctggcttcttctctttctttaccgatccgttctacatcttcctgcttctgtttttcgatcgcctcggcgtggtccttctgctttgcttcccactcctgaaggatctcttctatacgcatctggcctgtgatccgcagttcttccgtcttctcggccatcgctttttcttctatatcgataccgctggctactttcacgccgtttgccagcgcttcctgcagcgtcgctcctttgactactttagttatcggagacttctgctgcttctgctggagcgcttccagctcctccagttcttctaccggcatctttcttgtctcgtctgtcggcacatctacctcagcctctaccgctttcagcacctcatccatcacagatgtctccgcgcccggctgcttggtcatcaccggttctatcttctccggagaactgtacgcctgctctacaggttcttcctcttgttcctccggttctgcagtcaaaggctggctctttctcaccggaacttctgcggctgcttttttgatctgcggcttctttgcagcgcccggacggctgtcatacttttcctgctgcagcggtgtgagcggcttgtatttcatcttgagctccatggcctggtatacatacttgccctcgctgaaccaaagtatgagatcatcgcactcttcaagacattctgccgtcattcccgcttcatggtataaaagcgcaagctcataagcccatttctcaacgtactcagactttttaaaatcttcaagcgctgtgatctgttcttcatatgacgccttctgtgctttcagtatcttgtattttaatatgtactggttcggatcctttggggccagctttacgaactcttcatagcagtccgacgcttcttctatatcgttgatcttaagcgccagtgtcccgagacggtacacgatcttcctgctgcccggagacctgtcgtaggcgacaaacaaaatgtccctgctcttttgaaattctccgtttgattcgtatatttcacttaccgtgttgagcatggatgcatttttcacccttctccagtccacggtatccgctatttccatcgcttttttatattgctttttctccatatattcgagcatctgctcggtttttacacgatattcgtatttatccaaagttctcacctcaataatattttttatactattcctctccagtgtttcttaacagttgtatggttatcctatactactccataatttcactgatataagtttatcataagcctatatcaatgtcaaaatataagcataaaaaatattaaaactttgttacaaaacattacaaatctaagaagtggaaattcttaccataatttcatgattttatggcatttatataaaagtgtaaaaaaacagccaccatacttttttcaattatgatggctgttttatattaagttttatcatatttattcttctttatcggaggatcattcttgattctattccctaagcctgtctccttttcatattcgaattataactcaaagcttcggactataaaattataatcttcatatcattatttatatccctcttttttctctatataagtcagtcaacccggttattatacctatagccgttccgaccatagccactgcccttatcattttgtctacagccgtattaagttatttcttctataaccactgcttatatagctcccactatataaattcagatatattagctgatgtttcttcacacatcgtctaatctctttgaactatctgtggtatattctttcaatatgtctgcaaatatgaatcttgccaatccggtttattcttcttctccgatttctcttttcattattttatctaccggcttattctctattgttaaggcttattctacgggaattgatatttgccataccactaacatattgagctttagattctgatattacattgtccaatggattaagcctccttcacttttatttccaaatttatatctcacctacatatgaaatataattttttataatcctttgaaaaatggctggcatatatcgttcataatatgtgtctccatttttcaggaatctctttctcgtcaagattcttttttggatttcctttggattgactatataatatcatcggtctttttatttgtcaatactatttttaactttttattttattaatttataattgtatatatttaactaaatattctgtctttttaaacattctgacaggtctgtacaaaaccgcgctaaaggatgatatcatcaattttactgtaatcccccaggctgtatgactctaccacattgccctggacaatatacagaacatctcctatatagatcccccgcgcggccatcatcccgctgccgttgatctcttcatccaagagacacttgaatccctcccggctgtcatagctgaacagaaaatatttctgcccccctgcctcgtatcccggaaaaccgatcatatttttcccggcgtcgatcaatgccgccctgtgatcataagatacatccgtactgtatacattatccagcacatacgtgtctttctctttcacatccgtcatatcggatatgtcaaacatcgtaagcttcacacctccggtgacggaggtcttctcatccacgtccatgccgatccctatgagcaggttttctccgtaaaagtgcagataatctgagaaaccgggtattttcagcgccccttttatctccggcttttcaggatcggacagatctacagaatacagagggtctgtctcccggaatgtcacaaagtaccctgtatctcccataaatcttgcagaatatatgcgttcgtctttcgccaggccttctatggaaccagtgatcttcagcttgtcgtccagaatgtagaccgcgttggtatctcccgccgttaccgccactctcaggtatcctttgtactcatctatggagaaggagtcattcagataaccgtcgaatgtgccctgcgcctctgcctttagccttccgtccttatatgcaattctgcgtaccgttgtatttgttctgccggatccctcccactcattttcataataatagatgttctcattgctcacatatatctctccgcctttggaaaagatggctttgctgtccgtgatcgtgtccgggtcctctatgtcaagcgacgtgacgacctcatacatattggccatatctgtctgcggaagatatatcgcgtcgcttgccagcggcctgccgttcacaagaggtacaaaggacttctcatcatcccgggcaatgccggccccggcatagtatgtgctgaacagatatacatagtctcctgacattctggatgaactgtaagttccgctctgctttattctgccggtctcaacgggtttggacggatttgacacatcatacgttacggcttctgccgacccattgtaattcatatcccgcagcagactgtctccgctatcccctgtgctgctgcagaccatgaccagcttctttttctccgggttgagatagaattcctctattctcgtcccttcttctgcctgtatatttccatattctttaagactgccttcttttgcttccactatggccacttcctggcggctgtctttcagtacatagaggtatttgccgtccgtcttggccgtatccgcctcatccacgccttcctgccgtacatttgtggacgagtatacggccgcccctgtgcctgcgtctgccttgtctgcttctgcgccggcattgcgggtagactggagggaggcatcttccgatgatatctcgctgctctcctctactttgaactcagcttcttcacgatccatctgcttattatagttttctatatatgaatagacctggtcataatccttcgctgaagctatcttcccgccgctggccgccggagatgttttccctgtctgtacacggtctccgccaccgccgtaccgcagtacagccgcggatactccggccgccagaacaagacaggcggccgcaaggcaggcagcccggctcagacgccatttcccggctttccggctgttttcttccagtgtctttttcaccgcatcaggacgtaagctgtccggcacctcgatgttcttcgtcttctcatctaactgtgtcagaatatcctgttcccttttatccatatcgatgcccctttcactcttatcacgttatctaagcacacactccatcttttccagcgcccgtttccttttggatcgcaccgtgctggcgttcagcttcagcatggcgccgatctcaccgctgttatacccgccgaataccgacaggcctatcacgagctgctcttcctcttccagcacaaaaaacgcctgccgcacatccagggccagaccataatccggctgctcctgcgcctcctcccaatatgtatcaaagggctgctggttcttctgcttttccgcttccttacgcagccttttcctgcagacattggccaggatcgtaaagatccagctcttgaacgcctccgccttccggagctttccaatattttcataggcagatactaccgcctcgctgaccgcgtcttccgcatcatgcccatttttcatcaggcacagggcaaaccggtacagatcctggtagaccgtctcatataattgcgcaaacatgcttgcatcacatttcatatcctgccctcccgtgagatatgacaataacttttccaaatacgtgtgatataaataagagtcaaaaaatacccaaactgttgcatcgactgtggaaaattattgggataaaatggggacaattaattggggacggaggaaaattaaaaaacctccgtccccaattaaattcagggtgtccccttttatcctttgtagtaatttataaggcatcctttcaggatgatctcgcgttcagcatccgtcatgtcgccgacgctcagtgtgatctctttcagtccgccgccgactacatatgctttgatttccgccgtcttatcttcgatcgcctttttgatgtccggcacaaagatataatctccgttcttaaagctcaggttctgatggtcttccgttgtgatgaatgggagcattccccagttgatcagattggagcggtatctcttcgtggcatattcattggcgatatttgcccatccgcccagaactttctggcaggacgccgcctgttctctcgcggagccgtctcccggcttcacggcgaagatcgtgcttccgacaccgatatttccttcccctgcatccgggaacatcttgcgcacttcgcccatcaccggctttaattcatccagcacttcgagcgggcacgtgcctgcttcgatcgctttctgcgccttctgcacttctttcgcccggcccacataagccggatccttcctggacagcgcaaattctgcaagtccgagcggattggagcggtaagaggatgtctcgccggacgggataagctcatccgtcgtcgtgaccggatcgtggatctccgacactactttaagtacaaggtgctccggcagcgcgggcatctcaggccagtccttgatattcggtccgaacttgatctcgacagacgggtctgcctcccctttactgtcaaatactctgttcgcatatatttctttgtcaaaatggtacttctgtcctttatattctacatcgatatctgctgctgatgtgaggaagcctttgttcgccgcagtggccgcgatggagcgcgcgtccataagcgccacggatgatatctgaccgttctgcagcttggagccttctctgttcgggaagtttctcgttgaatggcggatggagaacgcgttgttggccggcgtgtcccccgcgccgaagcacggaccgcagaaggctgtctttacgatcgtacccgcctgcataagatccgcgaccgcgccgttcttcacaagctccatgtagatcggtgtacttgccggatatacgctgaacgtaaattcatccgctccgatatattttcctcgtatgatgtccgccgccgcgcagatattttcaaaaccgccgccggcgcatcctgcgatgatcccctgctccacatacagctttccgtccacgatcttgtcctggagagaatagtcgaccgcgccgtccaggctcacgagcgctttctgttccacatcgtgaagcacgtccttcaggttagcgttcacctcatctatcgtatatacattagacgggtggaacggcatcgcgatcatcggtttgatctcactcaggttcacgtataccatgccgtcataatatgtgaccgcgccggggttcagttccctgtaatcctcagctcttccgtggatctcatagaactctttgatcttgtcgtctgtcttccatatggaggacaggcacgttgtctctgtcgtcatgacatctatgccgatacggaaatctgcgctcagctttcctactccaggtccgacaaattccatcactttattattgacatatccgttggcaaatgtagccccgatgatggcaagcgccacgtcctgaggacccacgcccctggccggctcgccgtccagatagatgcccacgacgcccggcatcttgatatcgtatgtcttcccgagcagctgcttcacgagttccggcccgccttcacccatggccatcgtgccgagggcgccgtatcttgtatggctgtccgatccaagtatcatcctgctgcctcccgcgagcatctcacgggcatactgatggatgactgcctgatgaggcggtacatacacaccgccgtatttctttgcacatgtcaggccgaacatatggtcatcctcattgatcgttccgcctaccgcacagagcgagttgtggcagttcgtcagcacataagggatcggaaaccgttcaagccccgaagccctcgccgtctggataatacccacaaacgtaatgtcatgggacgtcagtttgtcaaacttgatctgcagacgatccatattgccggaagtgttgtgcgcttccagaatgctgtatgccatcgtattcttcgcggcctcttcctgagacacggcctgccctgttccggccgccgcttccgccgcgtcctccacgatctttgtgccattcagcagataaacacctttatcgtataatttcaccattttatgttcctcctactcttttatatatttcatatggtttgcaaccatcatagctatcttaaatgtgagcgcgtcgtcgaacactctcacgtcaagcccggttttcttctggatcttttccagcctgtacacaagtgtgtttctgtgcacatataactgccttgctgtctccgaaatgttcaggttgttgtcaaaaaatgtatagacagtagccagctcttcctcgtcaaattcaccggcccctccgccttcaaacacttcttttaaaaacatttcacacagcgatgccggaagctggtgtatgagccgtcctatcccaagctcactgtacgccagtatatttttttccgcatagaatacacggccgacttccagcgccatagcggcttctttataagacttcgatacatccttcagttcctcgattatcgtaccgtaagccacacggacactgaccatggcctccatattcagtgtatccgcgataacctttgcagtctggttcatatctttgtaatcttctgtcttctccagcgccttcacaagaataatatgtccctcatccacggccgtcacaaagtctctgctgccggtggcatacagcccctttaacgtctcgagtacaagattctcaccttcatgcttcggttcaataagaaagacagctcttcgcagctctgccggtatcttcatcttcttcgcctgattatagacatctaccagcagcagattgtccaggatcagattctggataaaacggttcttgtccattctttccctgtatgcagagatcagattctcaagctggctggccccaaggcgtcccgccgtggcaatatcagctttgtccccgcaaagcgccagcacatattccggcgactcctcaccgctgacaagaaacagccctgcgccgtcctcgatatactcttccgtctcctcggcgtttttaatgaattctgaaaccttcttataaagcgctgtctgcttctcattcgtcatcacaaggcatgtcccgcgcaagtcccagacagagccttcaagctccgttatcctccggatatcctggacggtcttatgcaatacctgattcgataacattcgcatcctcctgtcggacgatatgtccatttatcattttaccatacgaaactgacagtgtctaacattttaccattgacaccacactttaattcctgtatgataccctcagatgacagcagtatctacagtcgccatactgccgtcttttgcatatggattatgactttgccaccgggtaaagtatgagaagcgtttggaattcatgccgtcaggtcttagaaggtatgatacccggcgcttttttatagcataggaaacttcgttccctatgttataaaaaccctccgggggaggcgcacgcgcgcgaagatgtaatatgtcgcaggcgaccgcgcccggcgcgagaatgtgccaaggcacattctttattggaggttaaaatgaaacgctcagcagacacttcactgttttcaacattcttaaaatatgtactcttcaacgtcacagggatggtcggcctatcctgctacatcctggccgacactctgtttatcgcccgcggactgggacccgacggcctgaccgcgctgaacctggcgattccggtctacagcttcatccacggcacagggctcatggccggtatgggaggcgccaccagatactccatccagaaagcggccggcagcaatgcggcggcgcgccggaccttcaccacagcggtcatcacagcgctcgtcctgtcctctgctttcgtattggccgcagtccttggagaccgtgcgctcacctcacttttaggcgccggcggatcggtattcgagatgacacgtatctatctgaaaatcatcctgctgtttgcgccggcctttatgctgaataacgttgtgctctgttttgtcagaaacgacgggagcccgaacttgtccatggcagcgatgctggccggcagtttctccaatatcatactggattatgtctttatcttcccgctcggtatgggaatcttcggcgctgtgatcgccaccagcctcgccccggtcataagcctcgccattctctccctccacctgctctcatcccgaagcggactccagtttgaacggccggcgcatattgtgagaagcagcgccggactgctctcactcggcctgtcgtcctttatcgcggaggcggcgtccggtatcgtgatgatcacctttaactttatcattctgtcactgaaaggcaatctgggcgtggcagcctacggcataatcgcaaatctgtctcttgtcgtcacctccatctatacgggcaccgcgcaggggagccagccgctgctcagtgaagcacacggcgccggccgccaggacagcatacgcagagtgtacacatacgccgtcacgcttgccttgggcttttcggtcatgatctacagcctgctggccctccttcgggatcctgtcataagcctgttcaaccagaacaaagacacggccctggccgctatggccggacagggcatcctcttatacttcactgcatttttgtttgtcggtgtaaatatcatctccgccatattcttcagctgcgtggaacaggcaagactttcttttacgcttgcgatgatgcgggggctcgtccttcttctcccgctcgtgatcctgatgtcccggctgtttggcatgacaggagtatggctttcctttcctgccacagagctgctcacatgcgcggccgccgtcatttttatccgacgatattggaaaaaacagcgcacgtaaaaagaatgccggtcctttcgggccggcattctgcgcactaagaaaattagtttgtgatcgtaagttctgtctctttatcaaatacgtggatcttctctgcatcgagagcaaacttcacggtatctcctgttcttgctgtcgttctcggatcaacccttgccgtcatattggagccctcataatcaaagtacagatatacttccgcgccgagcatctcatatacacggatcgtcgcttctatcactgtgttcggggaagactcgataaacatctgctcatcgtgcacgtcctccggacggatgccgagcactacagtctttccatcgtaaccgccgtcgataagcttctttgcttttgcaggcggaagttcgatcgcggaaggtcctgcctggagcactaccttgtcgccgttcaccttgcacacggcgtcgataaagttcatctgaggagatccgataaatcctgccacgaacaggttgcatggataatcgtataatgtctgcggcgtatctacctgctgtacgatacctgcattcataactacgatccttgtaccgagtgtcatagcctctgtctggtcgtgtgttacatagatgatcgtcgttccgagtctctggtgcagcttggagatctcaatacgcatctggcctcgcagctttgcgtccaggttggaaagaggctcatccataaggaataccttcgggtcacggacaatggcgcggcccatggcaacacgctgtctctgaccgcctgacagagcctttggcttacggtccagaagctgttccagatcaaggatccttgccgcctcgcgcaccattttgtcgatctcatccttcggcgtctttctcagcttaaggccaaatgccatattgtcataaacagtcatgtgcggatagagcgcgtagttctggaataccatagcgatatctctgtccttcggctctacgtcatttaccactttatccccaattttgagctcaccggaagaaatctcctccagacccgcgatcatacgaagcgttgtagacttaccgcatccggacggtccgacaaatatgatgaactccttgtcgtcgatctcaagattaaaatctttaactgcttcaaatccgtttggatatactttgttaatgtgctttaatgataaacttgccatttttttacttcctcctaatcaacctctcgtatcatacgatacctttttcgttctgtaacaaagtatataaaaaaagttcaacctgaaccatgcccaagttgaacaatctttttaaatttttctatacaagttgaacaagaactgtaacacatggaaaaatgtgctataacagcgcctggtacacatctctctttccgatcccgcggtctctggcaacctgcttcatggcgtcttttttggacattccggacgcaagatactgctccatatgatcttccacactcagctcctcccaccgggctctggcctcttccctgacggcctgccggctctttccttccacgacgatgacacattctcccttcggttccgttgtctcataatatgcgagcgcctcctccagcgtagtgacaaatgctgtctcgtgcttttttgtaagctccctgcagatggcggcccggcggtcgcccatcgtctgagccagttccttcagcgtcctgacaagacggtgcggcgcctcatagagaacgaccgtcctcgtctctcccgccagttcctccagtatctctctgcgctcttttttgtcagagggaagaaacgcctcaaaggcaaaccttctcgtggacagccccgacagcgtaagcgccgtaatacatgcggcggctcctggcacagaagtaacggtgacatctgcctcgtagcacattttcaccagttcctcccccggatcagagatgcccggagtccccgcatctgtgataagcgcgatatcgctgcccctgcagagcatctccacaagcttctgtcccttttctatcttgttatattcatgatagctcgtcatcggcgtcttgatctcaaaatgattcaaaagcttgatactgttgcgcgtatcttccgccgcgatcagatctgcttcttttaacacacgcacagctctgaatgtcatatcctccagattcccgatcggcgtggcgcacaaatacaatgtaccggacataagcccctccttttcctctttgcggcgcagcaatgctagactccatacaggccgcgcagttcttctgtgtactccccgttcttttcatatacaatgagcggcggctccgcctgcatcctcggcctgccgtccttcagcccttcgatcagcaccatgttgggctccttgtccacatacggatacacaagcctcatgcgctttggttctattttaaaactgcacatcttcgcaaatatctccggcaggcggaatggacggtgcaccatgtagaacctgcctttcggccggagtatcttcgcactctcacgcaggatgtcctccaggcttacgagcgcttcatgccgcgcgatatataatgcctccttgtcatttttcagtccgtggtctccgatcatgtacggaggattcgtcgtaatgacgtgaaaagaggccgccccgaataaaccggctgcctccctgatatcgcctgtcacaatgtcgatcttatcttcaagcccgttgtggagaatactccggcgcgccatatccgcgctttcttcctgtatttccagcccggcatagcgcgaaccttcgttcttggcctcaagaaggatcggcagaatgcctgtccccgttccgagatccagcgcggcttccccttcccttacagaggcaaatgaagagagaagcaccgcatccattccaaagcagaacgtgcccggcttctggattatctcatatccttttatctgcaggtcatccagccgttcgcccggcttcagatcagttatcatctaactttgacaccccattcttctcttccagcgctttcagctccgcaagctcttctttcgtcagccttacgtcctttttccggcgctttggcttaaattttaattcggccgacttatattcgcggatttctttttcatcattttccagcgtaacgatcacttttacctgctggcgcaggacatttaccgactgtacatccccgtgcagcccttccggcgtagttacatggtcgcccacggaaggaagccggctgttcagctcctcgtatgtctcttcttcgtttgtcagacagcacatcagcctgccgcacacgcccgatatcttggtcgggttcagagacagattctgctccttggccatcttgatggacaccggcgcaaactctgtcagatacgtattgcaacagagcggtcttccgcatatgccgatccctcctcgtatcttcgtctcatcccgcacgccgatctgtctgagctcgatccttgtccggaatacgctcgccagatcctttacaagctcgcggaagtcgatgcgtccgtccgcggtaaagtaaaacagcaccttgttattgtcaaatgtatactccgcgtcgatcagcttcatctcaagaccgtgtttgcgtatcttctccaggcagatctcaaaggcttccttctccttctccctgtttcttgcctctttctccacatcttcctttgtggcaatacggataacggacttcagcggctgggtgatcctctcatccgcaacttccttcggcccggtgacgacagaaccgaattccacgcctcttgcagtctccacaatgaccttgtcgtccgtcttaatattaaactttcccggcgcaaagaaatatatctttccagcaggccggaatcttactcctatcacttttgtcatatcgctaattctcctttatggtaaggaacagaagctccatcgccagttcaaaattgacatttgccttcagtctcgtcttggctttttccaggctgtccagaatcagctcgatcccttcatacgaactcttcctcgcctgttcttttatatatttgatctggtccttaaacactaccctgtccatatctttcgtcgctttatataacaagacgtccctgaaccataccattataatgtccaggtagtcgttgatctccagtttataagtcgtaatgcgctttaccgcatccacgatctcgctcagttccatctccggaatatacttcagaagctgtaccgcctcctcacgtatctcgttaaaatactcggaattcgcaagcagtatcgcccgtcccatattgccctgggcaaatgccgtgcacatgtctgccttataatccggcacttccatcgtctccatcagatactttttaatgagtgtatccttgatattccgaagcttcagcatgacgcaccgggaggcgatcgtcggaaggagcgtatccgcattttctgtcagcagcatgatgaccgcgtactccggcggctcctcgatcgtcttaagcagcgcgttctgcgcctgcacagacatcatgtccgcctgcgggatgatatatatcttatacggcccctgataaggctttatcatgatcgtgccgttgacctgttcacggatgtcatccacactgatcgtatttggcttctcatgagtcactctgatgatatccgggtggttcccactttctgcctgcctgcaggaatggcactcattgcacggatcaggacctgccttctcacagagcagcgttgtcgcgaataaagttgcgagcatctttttccccgctcctttttccccgttcagtatatatgcgtgcgacaccttgtcttcctgcaccgcacttcttatatagtcgataatgtttttgtggccaaccacatctttaaaacttcccattttgtattcccctagtattttttcttaaaaacgtacattagttgctgttatattattcctgcatccagacctctatataccgctcccgcgccggcccttccacagaatatcccatgtcctgataccattgtaacatatgtgcggcctcttccgataccttttctcccggaacgatcaaaggagttcccggcggatacagatacacatattcaagagaaatgcatcctgcgctttcctcccggggaacaaactttacataccctttttcggacctgtccgttccttccgccagagccgctgccgcaaaactgcaaaagactacttcaaggcgcggcagtatccccccaaaaggtatgcccggccgtccggatacggccttgtccggtctcttcttcatacgcctgcctgtttcacggtcgatttcgcgcagtgcacagacaaggcggtccatcccgtcctctgtatccgccacagacgtcatggccagcacatacgtgcccgcggccatctccatctgtaaatgataatcctccaaaagcgctttgtaaagcatccgtcccgtcatatctgaatctttcgccgatatgacgatcttggagcggtcaaaatgcgccgtctccgccagcttcagacagtgaagcccctttaactccgtgcgcgtgcgctccagcagctttacatacggctcaaacagcccgcggcccccattttccagcatatcaatgcaggaatctatacttgccatcagcacataagacgggctgctcgtctgaagcatatgcagataatctctcaccttccggcgttttacaagcttcccgttcatatgcagcaatgctgtctgggtcagcgacggcagtgttttatgcagactgtgtatcacgatgtccgctccctttgtgttggaattgtctggaaaataaggatggaatccaaagtgtgccccgtgggcttcatcgacgatcagcggaatccctttttcatgggccgccgccgcaatagcctcaacatccgacacaactccgtcataggtgggcgagacgataatgaccgcccgtatatgcggatgtctttctaacgcacgctttacatctccggcagatatttccgtgttcagacaggtgtctgtactgaatcccggatacaaataaacaggatttaactcatttagatatatagcatgatacacggacttgtggcagtttctcgccacaagtaccgtgtctccttttttagtcacgcccgcaacagcgctcaagatccctaccgtgcttccattgacgagaaaatgcgtctcctccgcctggtagacgaaggccgctctttcctgggcttctcttagaataccgtctgcgtggtgaaggtcgtcaaagccttcgatctccgtaatgtcaatgtgatatgggacatctgttttgagcagttttgtattacgtttatgccccggcatgtgaaatccgtagaaatcagaatcactatattcatttaatttatcataaagtgtgttcatataacgctgctgctttcttctccatgtatgcttaccggactgcctgtgtccgggtaaggtgatattataacctcttgagcagctcttctctttctttttcaaatcccggctttccgagaagcgcgaacatatttttcttgtagctttcaacccccggctggttaaacggattaacgccgaggatgtagccgctcacgccgcacgcaaattcaaagaaataaaacagctgtccgagagaatattcatcctgcttcggtatgttgaccatcaggttcggcacattgccgtccgtatgggcaagtatcgtgccgttcatggcactcttgttgacaaaatcaacactttttcctgccagataattcagcccgtccaggtcgaccggttcctcgtggaggatgatctcttctgcagaattctccacgttcagaactgtctcatacatgacgcggcttccgtcctggataaactgtcccatagagtgcaggtctgtagtaaggtccaccgacgcagggaagatccccttctggtccttgccttcactctctccatataactgcttccaccactcagatacatagtggaggcttggctcataatttgcaaggatctctaccgccttgcccttgcggtggagaatattgcgaactgccgcgtaaagcatggcgtcattttcttcaaacggagtgttcagcgccatctccctgccggatgcggcgccttccatcagcctgtcaatatccgctccactcactgcgataggcagaaggcctactgccgtgagtacggagaagcgtccgcccacatcgtccggcacgacaaaggtatcatagccttcctcatcggcaagattcttgagcgcgcctctttccttgtccgtcgtggcgtagattctctttccggcctcagcctttccatatctcttctccagcatttccttaaaaatacggaaagcgatcgccggctctgtcgtcgtccccgatttggagataatatttacggaaaagtcccgttctccaattacgtcgatcagatgcttcagatatgtactgctgatgctgtttcctacataatatatttcaggcgtctttctgatctcctcagaaaccatgttataaaagttatggcggagaaattctatcgcggctcttgcgccgagataagagcctccgatgccgatcacaagcaatacttccgaatcactctggatccgctttgcagctttcttgatccgcgcgaattcttctttatcatagtcaacaggaaggtcaatccacccaaggaaatcattccccgctccttctcttgaaagaagctctgcttttgcctgctctgcaatatttttcatggactccagttcatgatcgcagataaatgtctttgcttttgaatagtcaaatgttactttattttccatagtgacccttcccttctatcttaaagtatatatcgtattcattttagcaaatcaggaaggtttaatcaagccataaactcttccaggatctggcggatgagcatatccttggccatcggctccggctttttctccggcttcttctcttcccttttctgtataggttccttgatctcctctttgaccgcagtttcaactattgccttgatcgggtccttcacatccggtacctcatacggttccggcattacaggcggcgtgatctccggctttgtggacggagacggcacttcccgcgccggcatagaccgctccggcgtcccccggtcgtcctttttctcttccgcttcgatcgccttgtccgataccgcgccgaactccactgccggtgattccggcgccattaccttcagttctttctgatatgtcttttcgtagcggcgcagacatacattttccagataatcgaccatgtaatttctcacggcttccaggcggtaattctcatccgtcgtcagatggaagagatagacgagtatcgcgagacccgcgcccgctgcgcctgttttgagcaccatgtcctgcattccgtttaccacgtactcaagcgccgcgcccgccgcgcctatgagcagacacattcccgcggccgccttctccatgcgtctccagctgtgaagcttcatgcctgccgtcctgtattcgtacaggtacttgtccacaaacacattgacattctctacggtgtcgctgatcatgcatgcatgttcaaacttggcgcgcacaagacgcatgaggggatgtgtacttttattcatatttcccgccgcatgcaccatacgtttgagcgtaacattcacaatcagtttactgataatccccaatactgtcataactcccataagtacaaataaaatgtacttgtccaatataaattctaacataaaaaagccctccttcttgattcgattataaccgaagtcgcgaaggagggtaccaaaaaccattctacatattctgcctccgggcagagtaaaatctgtctaatctgttcagatcttcccgaggcacatcttatatattttccaccaattgttttacaagccttatactgtgtgcgattgcaagctcttcaaaagcagggtagtccatggcggcactgttgtcagctttatcagaaatcgctcgaatgatgacatacgaaactttgttcaggtatgcggtctgcgcaatgcccgctccttccatctccacacagagcggacggaagttctcctttatcttctccttcacggcgccggaggagataaactgatccccgctcgcaattctcccggtaaatgtatggatatccggattcacctgccggttagcctccactgccttttgcaccagctcttcatcggccgggaacgcaagcgtgtccatcctcggcacctgtccaaccgggtctccgacgaaagacgcgtccacatcgtggtgcagggcatctgtagagataaccatgtccccgatatcgatggaggcgtccagtgagcccgccactccggtattgatgatcatatctgtatggaagcagtcgaccagtatctgcgcgcacaccgccgcatttactttcccgatcccgctctgcactacaaccgcttctttcccgcacaagatcccccggcagaattccatggatgcccttgtcacagtctcctcgatctccatggcctctttcagggccgccacttcttcttccatggctcctataattcctatcatatcgctcctcctggctgaatatattctatcatagtataaaagtgcgccgtccggcgcctgcttcgtctcattatagtggatggcagcctgctttgcaaggtacggcaatatacatgtggaaattttgatatatctttgttataatttgttatgtgaatttatacactattgaactgatatggctcaataaatatagttaaacaatattaaataaaattttaggaggaagacatcatggaatatagaccacacggagtctgctcacggctcatccatctggacgtggaggatgacattatcaaaaatgttcagtttgtgggaggatgcagcggaaacacacagggaatcgccagactcgtaacaggaatgaaagtagacgaggcgatcgcacgcatggaaggcatcgactgcggcggcaaaggcacatcctgcccggatcagcttgcaaaagccctgagagcggcaacacagcgctaaatacagataatatcaatattgcttctgtaacggggaaaggatacagggctggggagccttgtatcctctcttgattagtccttaagttctttctggtatccgaaggaaccgcagtaagcaccgctcgcgacgactttagctcgttacgtgagcctacggtttctcaatgtaaggtcgaaattattgttaatagtttctcctgcaccgcaagcggtgcttactacagttccttcggatggtgcattaaatgttgctttgttactttagagatttcggatttcagttgataatacctatggttcttcgatgaatattccatttgtaaatgagctacttacatcatcattggctgagtgtgtacaccttactctgtaataatacccaccctcaactttgagttctctgttagctgatacacgatcagaatcattgttttcttttgcccaatttgcataatactcccaggagtacccttctcctttgattctttctactagaacagctattttaaccctttccacagtatgtgcagctaccgtagtcccgcctgcatagatacatcctggtcctaatcttacaactttagaatatcccgtcagaaggtcgactcctcttgatatctttgttgcataacctatggattcattgtcataagtaagataggaaccgtcaactaatggaatgtctgatgacgctttgataacggtcacgttagcaactaataagctcaagaataatatcaaagtgaaccccattgatattatcttttttttcatcctcaacctccgtacttacctttgccctcatatataaagacacatatctcgacaaaaactgacgcatatttttaaaaaaaatataaattatttataattttttccaaatcatctctattcatagaaccacttaaaaaatactcgagtcccttatatgaaaattttgctgaatatctttcaagtttatcgtctcttgtatcatattcttttacttcaatatcacattcatttatagtcaccgtccaagtacttttaatattatcttctatgtctatccctaaggatgcatttgaatatatagcattaatgtagtaaaaaattgtttcgttatttaatttataaaataattccgctgtttgcattttcttatctaactcaatgttttgaaataccatccctttgatacaaggcattattttaacagcatcacacccaaatgcatctttaatttcttggtatgcattttcctctttttcttcaagcgaaagatagttatcatcactagaatctacctgagcaatttctctgtctccaacaacactactcattaattttataaccctctccggtccgcccagactcgtcacccctatcgccatagccaaaacaagcgctgctgccaggctcagatacatctttttcctctttcccggtttcttccgctgtatcctgcgtccgatctcaagcgcttttttatcttcttccggcagaagagagtatattctttccttctcatattgatctatatttttatcaacgtttgaacggatctcgtccgtgattttttctgtaacgacttcatccgcacagattgtctccacatctttctctatgctgtctgcctcattatggaactctttttgaataagctgttccgtattgtctagtttatctttcatatatttacctctttttattacctgccttttctcttactcttgaccaatccccctgtaaacgtatattataagggtaacaaaatgctttctgctggcattatttatacttattgaacattaagttcaatatgatatagtatacgtatatatcaagattgggaggtcactatgaaacgtatcatcttaaccggcggcggtacggcgggccatgtcactccgaatatcgcccttcttccgcgtctcaaagaattacaatatgatattcattacattggttcttacaacggcattgaaaaggaactgatcgaacaattcggtattccttaccacggaatctcttccggaaagctgcgccgttatttcagtgtccagaactttacagaccctttccgtgtagtcaaagggctcggtgaggccaaaaggctcgtcaaaatattaaagccggatgtcatcttctccaagggggggtttgtctccgtacccgttgtcatggccggaaagcggcgtaaggtgccgacgatcatccacgaatcagatatgacccccgggcttgcaaacaagctgtccattccttccgcgacaaaggtatgctgcaatttccctgagacgctggagcatcttcccgcagggaaagctgttctgaccggttcccctatccgtcaggaattactgtccggggacaaatacaaagcgcgtgaatttcttggatttaagtcagataaacccgtaatactgatcataggagggagcctcggttctgttgcggtaaatgatgccgtgcgttctatacttcccgaattattgaactcctatcaggttgtccacctgtgcggacggggcaagattgatgaatccctgaagggattggagggctatgcacaattcgagtacattaaagaagaattaaaggacttgtttgcgctcacagatatcgtcatatcacgtgcaggcgcaaacgccatatgtgaactgctggcccttcacaaaccgaatcttcttatcccgctttccgccaacgcaagccgcggtgaccagattctgaatgcccgctcttttgaacgtcagggattcagcgctgtgctggaagaggaagaactggacaaagacgttctgctttcttcgatcaaccgattatatgagcgcaaggattcctacatagaagctatgaagaaatcctcacagcaaaattccatcgatacaatcatagatttgattgaatccgttgtaaataaataatttgttcctttgtgtaacaggatgcagaaaacaggtgtcattgcggcacctgtttctatgctttgttcaagagttcaaactggtcttcatagttctttctaatccatttctttgcccggtataacatactgtgcagcacttccacagatactcccattatttctgctacttccctttgtgatttttcaagacagtaagtcaatgttactgcttcgtaccatcgctcgtttatccggtacagttcttcaaagatatgatctgcaaattctttatactctttttcctgaagccttttctcaaattcgtcttccgaactttccatcgtccagtcttcatgcatttcgtcagacagaatctcacgctttccgtcccttttgtaattgagagacatatttctcgtcgtcacaatcagccaggaccttaccgcactcagattgacgtgttccataaccgtatacaatttcacaaatacattctgtgctatctcttcggccgcgtgatgattcccggtgtaacgtaatgctgtcttgtatacaatctttacattttcttcatagattgcatcaaaagctaccctgcctataaactcgatttccacctgttcatccttcttttcttctagtttatcttagccagtatgtcctctacatcttcatcctttagctcacccatcttccatccgagccctacctggtcgtttttatgtcttggaatgaggtgcatgtggaaatggaatactgtctgccctgccgcttccccgttgttctgcacgatattataaccgtcgcagcccagaatgtctgtgagctttttgatcatcttcctggcgagaacaagcactttcgcagcgacctcatcgtccagttcatagagatcggcataatgttccttcggtataatgagtgcatgtcctttggctgccggacttgcgtcaagaattaccctgaaatcttcatcttcgtataatgtagccgtcggtatctccccatttgcaagtttacaaaaaatacaattttcttctctcataatgatacacttcctttttaattttatgattgattatttacaccgccaatgctaaactgttagttcagaaagggcggtaattactatgtttacaacgacagacttcgacaaattacaacagatcatggacgaaagtcctgagaaaaaagagctgttacaaaagctccttgaatcacagaagatgaccatcagcagcatcagtcatgagatccgcaatccgctgaccctcgtgtacagtacgctgcagcttattgaggcacagcatcctgaggtcagtacatacaaatactgggacagcatgcgttctgatgtagagtatatgaccattctgctggaagaactctcagccttcaacaatggagaaagtctttcgctatcggaaattgactgctcctcctttttgagacctgttgtgctctcttttgcagcctctctgaccgagagcagtattgaattcacctcaaaactggaaccggatctccctgtcatctgtggagatgccgtaaagctcagagaagtcatcctcaatcttctgcaaaatgcaaaggacgccgtggatccggacggcgcaatctacttccacgcttttacagaagccggaaatctctgcatcagcgtcagagacaatggctgcggaattccacaggaagatatggaacatatatttgagccgtttgtcacttacaagcaaggcgggacagggcttggactcgccatcggacggcgcatagcctcggcacacaaagggactttatctgccgtatctgttcccggcggaccgacggtttttactctttctcttccaatagagaagaacgcctagcaggaaccccgacacaaggcctccgatgtgggcaaggttgtccactccgccgctggtaaatccataatagaggctgatgatcaccatgaacaggattccccggccggatacattgccgatccggccgcggttgcgaatcgccacataaagaagcgctccaatcaccccgaagatcgctcccgacgcacccgctgacacaacatactctcctgtccgcatatctccggccatagacacaacgttgccgcacagtccgcttgcaaaatatatgatcaaatattttatttttcctatctcaacttccagattccagccaagcagtacgaatatgaccatgttgttcatgagatgctgaaaaccaaagtgcagaaacatgcttgtaaacaaccggtaccactcgccgcgttctgttatatacggtacatacattgcaccgtgtgacagcatataccctgcgtcttccgtcattcctccaaatgaaaggacgaagaatacgatcacattgaccgcagctattaccgctgtacagggcgcttccatctttatatttttcataatacagtatttcccttatatagttattttttccctttttttatgtcagtcctagtatatcataccttctctaaaatagtaactactgtattatttataattcttcctcctctatgtacagcccgtcaaaatctccccattttggttttctgtgcctgttcagaaagcgtttgaccggggtccacatattttccgtctcttccatgatcgtgccggccatctcctgctccgcgatccagtcatgctcctgtctgtcataggcaggcggcgtatcttctgtcttcatgttctcttttttccactcctcaaatgtgtttttccctgccgcatccatacactgttccgtgagtttttctaggctgtagttttcttccatgacgcccttgtgcagcgtgaataccatctggacgcatgccctgtctttataatctgcatgctttacaaaatagtcggcaagcaatttcagcgcctcccatatgtcatgttcctccggaggataatagcaaaaataaaatgtctcttcctcataaaatatatattccggctccagcaggatacaatgaatattcagcagatatttttctgtctccttgatgagcgccatgagttgatgcagaaacagctcaatgtccctgctgcttaattttccccgctcatacattgccttcatcgatatctttccgcttacttcataatcatatctcgttttaccgtcgacaccctgaccctgtattttcagaaatccggcgaccgggtttgccctcagcattcttatctgatagtcttccctgtatatgccctctgtctcaattgatatttttcgttccataatctctatttccttattctcctcatatctctgatatatgcttccggctccgtgacccgggctttttttactacggagagcttccgtccttttccggacgcagcggcagtgactgataccgcattttctgtgatgctgatatctgcctctgctcccgcaaacagaatgcattttccatttactctctcccggaacagccgctttagttctccctctttggccccattcttctcatgggccttcgtgcttccaaccactgcagtctcataggccgcacccgatatgatatttttatcgtgaaaatagaagaccgcggtgacgcactgcatgatgagcagcagaataaccggcataataaacgacatctctactgtcatacttccgttcagtctcctctctttcagcatattaaccaactcctgtcaatagtacgagaatataaccgcctgtgagaaagggataaaatggaagggatgtccttcttttacagcggccggtcatgaaaaggatcatcccggcagggagaagaagcgcaaacgcgccaagcagcacaccgagcaagttccacactcccaaatagattccaagtataagaatgccccagctgtcgccgtaaccaattccttctttcgtcactttgctcaagaacaaaaagcatccgcccactcccgcgcctgccagaacaagccacccatcggcggttctgaacatgcactggtacagcagggcgcccacacccgcggtcacaagcattccttccggtaccttccggaagatcatatcgctcaccgacattcccgccagtgcgccgatacaaatgatctggctcactttccacaccgctggcacgccccctttcctactgcctcggatactgggacagcataaattgttctcttcagcccgctgcagccaagcgaactgtgatacctgtttcctgaatctgttataaataccgcgccggagcctgagccggcgcaatgttcgcacggatagtattttccgccgtcctcatttctaagccccgggacgtccgacgcctgcaccgggcgtattgacagctccaaatgtgtacagtgataatcctcgtggtatacgatcccggtctgcgtcacatagaccgtcttctctctttcaccgctaagtccggccttcacatacccggtccatccttttatcttcatttttatctcataggaaggcgacggaagatggaacagcggaagaggcagcttaattctgtactctgccgacagactgcagattcctgtagtcggtgacatccacgacttatgacagtggattcccccgctgccgccttctactatacttcggttcagcctgtcggcccctatggcgttcactacgtccgcctccagttttgacggaacggcggccggaaggacgtaagcctccttcgcctgtcctttccccgcgtattgcagacccgagcgcactgcggtctgtatggcagccatctccataagataaaggagacagacaactgccagaaagaagatgggaaccgccatggcagcctctactgtgatacttgctttgacagagacggatgcagatacccttccggtatgataatcatagattttttgtgaggggagtctattcttattcatggtacgaatccttctcctttcttcatattctgtggttgtttattgtggataaatgaggaccggaagggtatctgcatccgcctctatcggtacccgtagtaagtcgggaactggtaggtgattcctctcctgagtggaacagtcgtttctatctccatcctgctgacgcactggtctgccttgaaaaaagccaggcccttctcccgtctcaggtcctgttctatcatgtccagtgttctaagccccgtatctccgctgtcggcaagaaagagaagaattctcatgtattcccggtagtccagaccgtcctcactgtcttttccttctgtataatcggtatctgttccaagagtgagcattgacgaaagctgaagctgccagctctcctttgattttacaagcggtactttactgcctttcaggagcgcacgtatgtctattatcgtctccccgaaggcccacgccagcaggatcccctgagccgcagcctccgccgcggcgggcagagcgatcagagagcagagcgccagagcggccgcctttgcctctgcctttttctcactgtccgtctgtatatacgcgtaattcggcacaaacctgaggagaagcagttttcgggctgttttttccagattttcccggtctccgggctgcccgttaagaatatattccagttcatagtccagcgccccggtcttctcccccttgtctgacgcgcagttaaaatgttccagcagatactctccgagcaaaaggcgggatactgctccttcctccttcccgacgtccgaaaaatccccatatcccttattgcgctcccgcctttccagcagcccttcgggcgggacagacttttctgagatgtgcatgtcctttgggcttacaaggctcaaaagcggcgtctgttttagttgttttacatgttccagcggattttcttctttgggcagttcactgtcgttttccgacagcagttcatcgagcgtgttctgcgcctccttgtcttcctgctcatatactccggccttttcttcctgctctttccatacagatgccgcccccagcttgtcctccatcgcggtcagaccatatttatggcgcatgtaggcgcttatctgttcatagaacggccggcatccattgtcggtaagaaactggattctttttattttatgttccatctgccctgcgccgtaaaacgacagccgctccttgatattctgttccgtgtaactgcccgtctcataacttgcctccagggcaaagatatcatattcttccagcagttctctctggtattccgcgaacagacactctacagcccggtccacatccgcccgtctgtaattcttggcgttttgtacagaagcgctctcaagcagtgctcctgcaaaagagacgagcaatatgaatacaagacttaaatatacggtcacttccccttttttcatagcttgttcctgccggacccggtcagatgccggagctctcacttgtgatcttctgaaagatggcctgtacaagacttgtcagctgggatttaaagatgatcacaagtccgatcaggacgaccaggatcaaaatgacttccacgaccccgatcccttttttatcttttagtacatgtataacgtattgaattctccacattctcattctcctttctacatctgcatggtcaaaaaggcgggcactacaacgatgacaagcactaccgtcagcatgaggaacatcggcagcagcagctttgttcctgcctcttcccctagtcttctggcccgcgtcttccgttcttcaaatgcctggacagcatctgttcgcagcaggtgcacgagatcctttgtgccctttcggagattctgggataaaagcgccccgaactttacatactcctgcactttgcagtgccttccgaaccgttcatagctctcggcttccgttataccgctttgcatctcgttcaaggtaactttcatctcctcataggcgtaccgtacgccccattcctctgtctgcttctcataatcgcgcacgatctttctccatgtgtttctgactgtcattcctgcgccgagaaacagcgtaaacttattgaccagctcgggataatcctgcagcatctgaagtctcttttctttttcctgtttatatcggttctgcttttccagcgcataaagcaggatcgccgtgagaactgccatgaccacaagcactgcccctctcatatccatttcccggtagtatgacacttctttttcatctactttgtcgggaagcttcagttctttttcggtccttgtattttcttctttctgcctgacggcattttttaccttttccacaagcgcggcgctgcctttcaccgttttcggaaagaccatggctgtgcactcatagagcgcctgtttccggggatcctctctgtatgtaagaactgctttcaaatggatcagactcccttttttatcgagcgcttcctgctggatctccccgtacacattcatgatgtcataccggtcaagctcccactcgaccgcaagtggccggcccggtatctcctgtatgagatccatattttcttcaatgcggtccaggcttttattgttccctaggatacgccgttccatctggcttacggcctggtcaaatacttctttgatctcccggggatcatactgctgttcttctacttctatctgcaaaggttctctttccccgccgccctgaacgctgacctccagctgctctgtttttttaccttcgccataccggtttctcgatatcgtcccgtccagttcggtcacgtatgcctttccgtctattatgagaaacaagatgcctgctgccatgagaagcagaacgctgactgcagctacacttcgattcttattatcttttgtccaagacagcaggcgcctatataagctgcaagacatactgtcatcactcctgttcctaatacatttccatataagttctgcataaactccgggaagcttaacgacatatatcctatgatcacataggggacagcggacattactttaaactcatattccctggacgccagaatcgtatctatctcccgcttcacctcaaccttgtccccgatctgtccggccgtgttccggatgatggcaaccatatcgccgccgctcttttttgccgccgcgaatactgccgtaaagttccgcacatcttcctgcctcacccgctccgcaaactcctccatgatctgttccatcgggacatttacccgtatctgggagacgatgatgtgaagctccttccttatcctgtcgttttccctgtataaaagcttcagctccttctccgcctctttccatgcgttttccacggaatagcctgtgctgagcgcagacgataacgactgtatggcgtccttgaactgaagctggaaactgccggactttctgcgcaggcattcctttttccatattctatactgccagatccataccggcgccagcagtggcacggcgattgcagaacggtagtaaagccatgccgtcagtatggtgatcaccgtacttttcagtatcccctgcacatattcctccggcttaatatcctgctgccagcagcttgcctctgtgcgcaatctcatttattttcctccactcgccctgtatccttccgtctgtatctcccgtctcttcgtatgcaaacagcgggcgcagcgtgatcccgccttcctcgtagtccagtacctctacgatctccagtaccttccggcttttatctctcagtcttccaagatggacgataatatctacaccggatgcgatctgcctctgtatggccggaagcgggagatccattcccataagcaccattgtttccaggcggctgagcatatctttcggactgttggcatgacctgtgctgagactgccgtcatgtccggtgttgagcgcctgaagcatgtctatggcctcggctgaacggacctcgcctactataattctgtccggccgcatgcgcagcgctgtctttataaggcttcggatcgtgatctcccctgtgccttccacattcgcattgcgtgcttccaggcgtacaagattgggaatatccatgatcctcagctctgcgttgtcttcgatcgtaataattctttcgtctccgggaatgtactgtgacagtgcgtttaagaaagttgtcttacctgaaccggttccgccgctgataaagatattgtatctcgccgcggtgagaagtgtgagaaagtccgccgcttcgcggctgactgaattccatgcgatcagctgttccatcgtgatcgtatcctttgggaacttacggatcgtgacgatcggaccgtcgagcgccaccggggcgagcaccacattcactctcgccccgtccggcagcctggcgtccgcaataggcgacgcctcattgactgtccggttggcgcctgacacgatctgctgtaccacatcctccagcttatctctggatgtgaagcgcttctccgtctggaaaagccgtccgtcctgctcgataaatatattttttgtaccatttatcatgatctcggtgatccgttcgtcttccagcagttcctggagcagatccagcttgcggaatgcattaaacagttccttgccgagcgcggtccgttctctcaacgtgatatattcctgtatgcaggcttcctgaagtaccctgtggatcaggtcggtgagttcctcgtcttctatctccctggtcatatccagctcttccattattctggcatgtaactgttctgcctgtatcatcccttctgttcctttctgttcagtttctgtaatacatcttcgtagccgagcagctgaagctcttcttcaaactgtctcactttggaacagctcatttcgtcttccgctgccggcatatgtacttctgtacagagccgcagtatatcatacacaccctgcagcccttcgtccacatcaagaatcaccgtttcataaatactgttttccattatctgacggataaggcctgtccattcctgcggcgtcacctcctttacatcctcggacaccggcattggatttatacagtccatatttttcagccggccggtcatcgccgacagcaccagcggcagatttttgctctcctgtcttgaatagtacagaatatctgccagcgtataacttgggttctctccaaaaacacctcctctgccgccgtatatctccatattcacatacagcacgtccgactttgaggcaagtctctggccgagttcgatcgcgtagcttgtctttcctattctgtgtaccggtgaaaatacaccgatcaatgtgcccctggtctttttaactgtccggaaaaaaagttctccggtatcgtcatacgaaccgcagctgttgattatttctgtcaggatcgcttccccggactggtatttctggatggggatctcgtcttttccgacttgctcctgtccgctcaccgtaaggataaactttttgtccgccgcaatctgctcccgctctttccggccgcagtctgccgggacgataagataatcaatatgttcctcttcctgcagtttctgtactttctgcaggcttttgcatacatatacttgaaaagcaagttcctttctcctcataaagtacgatgcaagcgcagaggcatatccatcctcaggatcgcagatcaccaaacgcttactgcccacctgtacctccctgttttcatttttttactttgaaactctttgccgaaacggccttggataacatgacttactgaaccgtaacaatacagtaagctaaaagattgaatctatcaaccagaactaaaacaatcagatacaagccatcagatttgacttgtaggacgattataactgtactttaatctcttgtccatctctttttataaaatactcaaactttgtgcaacccttacaaattttgatagaatgtaattccgtataaaagcgcaaccccgggaataccaagaactccggacgtcaaaaaggtaaccggattcattcccacatgaagggagagccctttccccgaaagaaactcatttacaaaaaatataatagcaattccaagtatcgcgcgtataataaaattaactacaaaatgcggcctttcctctggcatgtcaaaagcccctttttttcttctcttgttttcatgtatatccgccaaactggtattttattctcaaataatgtctatactaggtaaaaagaggacatataaccttatgctggaggtgacctatgaaactttttcaacggggaaagggcgcggaagaggacatatacagacggctgtccttcgaccctgacagtaatactcttgtggaggagatcgctcaggcgcggcaggaaattgaagacgcatatgaaaatttccaaaatgcttccgaccctgatctgatcgactgctatatctacagaggaaatgcagcctggaagcgctaccgctttctgctgcgtcaggcaaagatgatctaatgaaatgaaccatcacggtatgccaaaacaaaaaaacagtcctgtacctttaaacataaaccggtacaggactgttttttataattttatttttacttcccgctctgttctgtgatactggtgatacctcactccggctgcgtcaaacatgcgcatggacgcctttacggccgcggtgtcctcatatttgttgcagtcgaatatgacttctttgattccgctctgaatgatcgcttttgcgcattcgttgcacggaaacagagagacgtacagctttgcgccctcgagacttccgccccggtagttgaggatcgcgttcagctcactgtggacggtgtatacatattttgtctccagcgggtcttccccttccctgtcccagggaaattcgtcgtccgagcagccgatgggaagtccgttatatcccatggacagtattttattgtcctgacttacgatacagcatccgacctgtgtattcgggtccttggagcgcatgcctgacagcatggctacccccataaaatattcatcccagctgatataatcttttcttttgtctcccataccgcttttcctcctcgcttcgtacggacgttactttgttccgaatatacggtcccctgcatctccaagcccgggaacaatgtatttctggtcgttgagatggtcatccagcgcgccgatgtacagatccacgtccggatgttctttcgtcatgcgctccactccttcgggcgccgcgatgatacacatgaagcggatattttttacgcccttttccttcagcatgcggatcgccgccacgctggaaccgccggtggcaagcatcgggtccaccacgaacacttcccgttcgtcgcagtctgcaggaagcttacagtaatattctaccggctcaaatgtctccggatcccggtataatccgatatgtcctactttggcggccggaatcatattcaggataccgtctaccatgccgatacctgctctcaggatcggcactaccgccatcttctttccactcagttcttttcctgtcatctcacagatcggtgtttttatctgtacatctttaagcttcaggtcccatgtcgcctcatagcacatcagcgccgcgatctctccgacaactgcccggaaatcccgggagcctacatcctctctgcgtatatagctgattttgtgctgtatcagcgggtgttccatcacctgtacctttgacatgctgttttcctcctcgtttgtcattgaatatttatcacatgatgcccggcagctttcagaagcctgttcataatggcgcttccgattcctcccgtggcaaatgattcactgtagatatagtttaccccgtcgtcgtcaaattcccgcagtaccgcgtacagccggcctgcgatcgtcgattcgtcctcccgtgtgccgatactttttacatcgcccgatgtatagccggaaacggtctcttctgtcccgataatgccgactttatagccttctttctgtctggcgcgtgcaagtctgttgatctcttccgtcactttgggggccggtccttctatgatgaccagttctgcattcggagcgtagtgccggtatttcatgcccggcgccttcggggcctccgtgctgtcagccgtgataagcgtatggtcgactgccactgctcctatcagctctgtcagcatctcttccgtgaccgctcccggacgcagtatcatgggcggtgtcactgtcatatcgagaatcgtagattctactcctatctcaacaggaccgccgtctactatcatctcgatcctcccgtccatgtcctcttttacgtgctgcgcggtcgtagggcttggacgcccggacgtattcgcgctcggcgcggctataaagccgccgcccgcatcaatgacttccctggcgatctcatggcttggcatcctgacggccaccgtgtccagccctcctgttgttccgtaaggaacgatgtctttcttgtgaaatatcatggtgagaggtccgggccagtatttcccggcgatctttacagcctccgcagggatcttctccgccaccctttcaagatcgcccatatttgtgatatggacgatcagaggattatcggacgggcgtcctttggccgcgtatatctttgccgcagcctccccgctgagtgcatctgccccaagtccatagaccgtctctgtcggaaatgccacaagtcctcctctttttagaatatccccggcttcctgtatcatgcttttatttatctgttttttgtctatttttattatttttgtctccatggaaataattatactacactctactgtgacagacaagattggattccctgcgtgatcgcatcggccagtttctcctgatattcttccgtaacaagcttggcggcctcctccggattgctcagaaagccacattctacgatgatcgttggcacttctgtccttctgagcagataatatgtatcgttggccttggcctgtcttgtattgtctttatctaccgcaagcagcgccttctgcataagttctgccgtatttttcccatcctgggaatggctgtaataaaatacctgggctccacggatgtccgcgtcctggtagctgttctgatgaatgctcaccaccatggccggttttgtctcattgatcagctgcactctcgccttcatatcctgtactttcttgttcgtgtcgccttctttcgccagtgtcgaatcgtcttcccgggtcatgacaacttcgatcttgtttttcttaagtcttttttcgactttttttgctattgccaggttaatatctttttcattcgcgtcattcaccccgatcttgccggggtcattcccgccgtgaccggaatcgatcaccaccacctgtttccctttctccactttgtctccggatacatattttccaatatttctgctgactgttatcagccctgcgagcagcaaaatgagaagtaggaactctacttttttgcgcaataaaatacctcctgtctgtctatattggttaaatatatgactgacggaggtattttatttttaagtgacgggaaaatcagatggaaatgtcctgtttcacgtcattctttaattcacatacttcagtatgagctgccatacgttcgggtcttccagtccgagcgcccatgccgctgttccggccagcttgttctgcttcatcagatccagcttggcttccagcgatttttcatcttccagccagatctcatatgtcacgccgccgctttcccatttggcgtagttctgttttgcggcatcgtcccatgtgatctcggctcctgcctgggctacgacgtctttggcctcagtcattccgtaggctttgctctctaccttcatggcatactcgccttcttccgtgcctttctggcttgccagttcttcttccgtcttcggggtctcctcccacagtcttgtaaagaacggtatgccgctgatcaccttgtccgccggtacttctttcaatgtctcttcaattccctctttcacaaaatcataagaggcaaccgagcctgcttccggtgagcctgcataatgttcgtcatatcccatgatcacgacataatctgccacgattccctgttccctgcggtcatactgcatgttgaatcccttcggcacgtagttgtccacggaaagtacgagtccgttctgcctacagcgcacggacagctcacggatgaactggatatagtgctctccgcattcatctgaaatcttctcaaagtccacattgattccatctatattggactgaagtgcttccgccacaagctggttgataagtgtttccctcttggacgtatagctcagcagttcatagctttcatcgtatgagttgatgccgccgtcaaagtcccgtatcgttgcccatacttctatattggcctgatgggcgtaattgacgtaatctgtcgacgcgatggaatccatatttccgtctgtatccttcacatggaaccatgtgggcgcaattgtcgtaagacccttactctctgcgatcttctgcagcacgctgctgttggcgtcactgttggtcacgttgtgccatgccatgtttatcgtgtaatctttggaaatatttgtgaattcctgctcttcaaactttctcgttacgttctttttctctgcgtctttgagcgcgctgtttttgacgtaaccgataaatccgtttttcgtgcggacctttttccagttatcttcattttcgataacggtcacttcaccgccttttttcagctctgagagaaccgggctcttcactccaccctgatatctcacctgtgtgtctttcttcactgcggcaaccgtatgctcgccccagtcgccgacgatgacaacacgttccggttcgtcatacacttcgtagtcgatattcgtatactgctggacaaagtccagagcaatgtatgctgtgcttccttcggtttttaatatgacgtagtcttcgctgttcttgtctttagagaccgtataatccttgctgcccacttccaccgataccatgtccttcggcagtgtgtaaaggagtatattctcattaggatcccagtaaaatctgctgtttatatagtcacggacgatctcatactggatataggctttgccgtctgctatcataccttttggctctaccacttcgttattgactacaatagcaagctgtccttcttgttctataccataatatttatccaaatcagccttttccttggaagggctgtaccgcctccacaaaaatactgctgctatcgctgctattattaaaataacggtcaggcatatccgtatacccaggtttctccttctccgtctcttagtctgcggccttctggctgacggccttctgtttgcgggtcttcccgtctgcggtcttctgttcggattcctggaagcctggcttctgcccgtctgacttctcgtcccttgagttctggagccttgtcctcttatttcctgccctctcgctgtctggctcctctgggcccgctgcctgtccggacgttctgtattgccgggccggtccgaagctgtgcggcttcttctttgtctctcgtccatgctgcacctcctactagaccctattatagcaataattgcgacactcgtcattaactatttcgacattttattattattttgaggggtatctacagccgcagttttctcctgcagcttaacgtgatgaaagcacacttcttttatatctccgtcctcgtccaggacatagtccctcatatacgatatatcttctctcatcatatgggcttctacgatctgtgtcgggctggccggactgccctccatcgacaggctgacgccctccttctcataatctgtaagctcgttatacagaaatttataaatttcatttttcatcttacgtatcctccgataacattgcgatgatagctacggctgtatgcgcatatactgttaatacgcggccagaagaaatgcgtcgtgatacattggccgtatatgcggaccagctgcataaaaattagaagatagtcgtgcatttaaaaaaattttaacggttacaattgatcgtctttgatagttctattctggttgtttgtgaaaaatctgcctgaaccggcaatgtaaataatctgatttgctgttgatagattctgaaatagagcttacattgagaattacttgaaattacttaaaaaagtctccctcctttgttctaagaacgtagctatcagggaaaactatcttctagtatcgtcattataaatgattgattttacaaacgcaagcacttttttattttatacttattttattgaacatcccgcgtttcttatgctatactaaattagaaggaagtgatgaatatgaagattgaaaaactcaatgacaatcagatacgctgtactttaacgcgtgccgatctggcagcccgccagttacaattgagtgagcttgcctatggaaccgagaaagctaagtcacttttccatgatatgatgcaacaggcagcctttgaatttggttttgaggcggaggatataccgttaatgatcgaggctatacccgcttcttccgattctatcgtgctgataattactaaagtcgaggaccctgaggaactcgatacccgtttttcaaagttttcaccatctccgggtggtgactgggattcaaagaaaaatgaggcccctgacaaactggatggcgccgagactctcctggacctgcttggcaaggtaaaagagaagatcggcacacaggaggaaacctccggtgaagatacaaaagaagtccagaaaacaagcctccgcttattctcatttgcaacaatggacagtgtcattcaggctgcgcgcctgcttagcggcatgtacaacggttccaacaccctgtacaaagaccatggcgaagacgtatacattctggctctgacacaatcagaccatacaacgaatgattttaaccgcatatgtaatatgctgtcggaatatggctctttggaaaaggcttccggcgcaacgctggcgtttctggaagaacattgtgagattctgatatctgctgatgcagtgcagaagcttgcggtaatttaacaacacattaaaaagatgcaccgggtcaccccggtgcatcttttatatttgccgccttattaagcattcaaaaatgcattgatcttctcttctaataagtctgcatctatgccatgaaccatagccgcctctgccagagactctccctgtgcggacgggcagccaagacagtgcataccgatctccatgagtattggcgctacatcaggattgatgctgagtatctctccaatagtcatatctttgctaacctttgccatcatgacgcctccttttcattctaagtgtctccattatatacgcattttatcattgtgtaaacattttccgacaattaattcctaaaatttgacttctcaaatgtcaacatctttttcactttttttcgacaaaatataatttttattataacttcacaaaacgtctgttcttttatttgccctgagtaatccaccaaaatactatctttttatgtggataatgtggataaattttgaaaaactgcactttttccacctttttcacatgttttcatgtggataacttggataagtcctttttacaatattttcctattttttacatttttgtgtaaattgtacacccagtcgacaaataatgttatttccattattttccatgtcgaatttaataggttaatcttgtcctcataagaaaaagcccctgtctgacgcgggactttttctctgcttttgtgtttatctaaatcagtcttcttaccgtgatgatgttcgtgtaagtagcgggcaggatgccgattcctctggcgctgttgatcgcatttacgatctgtccttctcccatgtagatccctacgtgtccgtcatagagtatgatatctcccggtatggcctgatcgtagctgaccggagttccgacattttccatatcccatgtcgtcctcggcaggctcactccaaaatgcgcgtacactgactgtacgaaaccggaacagtctgctccgtttgtcagacttgtgccgccccatacatacgggtttccgatgaactgacaggcgtaatctactacagcttgtcccgtcccggccttggcctgagcttcttcctccgctttggcggccgcttcttctgcctccttggccagccttgcttcctcttcttctttcgattcagcataagtaaatgcttcttcaggggcttcggcttccgtgctctgcacgatctcctgcgctttctgctctgcgttatttcctattataatatactcggagtatacatagcctgtaacagagccggactggatcttcgtccattctcccaccggtcctatcaccttggcggcataatcaggatataacttacctacccactcactttcttttgttggttcacttcttatataaagaaatgactgtacattggcaaacgccatatctaaatactcacccttacgtgttggcacgagataatcttctacttctatatcattctgtgaagtatagcaatcattcagtacctcctcaattccaacgctcggcattatccctgcagcatccgtatctgcagccgatgctgtgacaggaaaagatgctatagctcctgtaatggtaactaggaacaatcccttcttaagaatagaatccataaactccctcctttatgttttcttatcttttgtaattgttacagaattgttacatatgttacggtgatattatatcaatgctgtccatcaatgtcaaggctatttaatggtgtttttgtcgtcatatttcttcctttttttaccagtttcatgataaaacttcattataattgttacaaattgttacatatatgatttttgagttgacaattgtttttatatgttttatactaatcatagtaattgttattattattgaaaggaggatgcgtagatggcaaatttaaaatacagcaggcagagagcttctattaaagaatatttggccggcactgttgaacatcctacagccgataccgtatatatgcacgtcagagaagaatttccgaatatcagcctcggtactgtgtaccgcaacctgaatcttcttgctgatataggtgaagcagtcaagatcactacccctgacggcggcgaccgctttgacgggcggacagagccccactaccatgtagtgtgcggttcatgcggtaaagtagaagatcttgagatgtcgtctgaagaaattgcttctataaataatgcggcagattctgtctttgacggaaagatcacatcacacaccacccttttctatggcacctgtaaagaatgtctggaaaaagaaaaataatttttaaaatagggattgacaaaagaaaataactgtgctaaattaatatcagtaactattactaatatttaattaaaaaattatataaaagaaaaggagagatttatcatgaaaaaatttgtttgtacagtatgtggttatgttcacgagggagaggctgcaccggctgaatgtccagtatgtcacgcaccggctgaaaagtttaaagagcagacaggtaacagagaatgggctgctgagcacgttgtaggcgtagctaagggcgtaagcgaagacattatcgctgacttaagagctaactttgagggtgaatgttcagaagtaggtatgtaccttgcaatggcaagagttgctcatagagaaggatatccggagatcggattatactgggaaaaagctgcttatgaagaagcagagcatgcgtctaaattcgctgagttattaggtgaagttgtaacagacagcacaaagaagaacctcgagatgagagttgatgcagagaatggtgctactgctggtaagttcgatcttgctaagcgtgctaaggcagctaacctggatgcgatccatgacacagttcatgagatggcaagagacgaagctcgtcacggaaaagcatttgaaggcttattgaagagatacttcggttaagatataatagagataacaacagcacagcgctgtgaataacaaagagggacggatgaaatctgcgatttcaccgtcccaaatttcaaaggaggattttgatatgtcaaagtatgcaggaactaaaacagaaaagaaccttatggaagctttttccggtgagtcacaggcgcgcaacaagtatacatattacgcttccgctgcaagaaaagccggatttgtacagatgtccaacatatttttagagacagctgaccaggagaaagaacacgccaaattatggtttaaagaattccacggaatcggtgatgtggaagccaatcttgaagacgctgtcgcaggcgagaactttgagtggactgacatgtataaacgtatggcggaagaagcaagagaagaaggatttgaagaacttgccaagaagtttgaaggtgttgcagaagtagaagctgcacatgaaaaacgctatggcaaactgcttgaaagctataaggcaggcaagaccttcaagggagacgctccgcttggatggaagtgtaacaactgcggttacatctactacggagaagaagctccggaagaatgtccggtctgtgcacatccaagagcacattttgaacgtaaagcagagaattactaataagttggggaaattggggacggaggttttttaaaaaacctccgtccccaatttattttaccgtgtccctttttgaaatatccctgtccccatcttaacctctctgaacctcaggatctatcctcttcttttaccagcattccacttcgcagcattatcggcctcaccgcattgtacaagcctgcaactaatatagttgatatgaccgcattgacaaatgtagtcgctgtgctccactttgcaagcacctctgccatcttctgaggctgtccgagtatatacattttataaaaatatcctgctaccgggtcggcgacaacgttaaatcccaggccggcaactgaagcaattatactccatttaaagacatactttttattattgctctcattgattcttgctattttatgagccaccaatccggtaatcaggccaatgcagagcttcagcacaaatgttttgggtgcgcctgtgatataaattggatccattatatcggcaattcccataccgaccgcaccggctatgcctccataccaacctccaagaagcagcgccgcaaggacacaaaatgcatttccaatatgaatggaagtggcatctcctccgggcatcggtattttaatctgcagaaatgtaaaagctacatagcacaaagctgccagaatagccgtctgagccagctttatgatcgttacattagatttcttcatataaaaatttcctttctgaaatgagctgagcatatactatcattaaattggttgtgttaaaacatccagttttctataaataaagcacaccagttgaagtatccggcaaaagggacagggcaaaaagcccgggcttttctattatcaagatatccacatactgtatgttatccgcttcctcaatcaaaaaaaatgcagctggtatccacctgtttatcagcgaatttatgctggatccgtggtataattattgtatcaggaggtgccagcttatgatgacaaaagatgccgataaaaagagagagcaaatgcaaatgttctgtatggatgacatggtccccaaagatcacatgctccgtttgatagataaagcgatcgactggcgttttatctatgaacttgtagaagacagatactgcccggataacgggcgtcccagtatggatcctgtgatgctcatcaagattccttttattcagtatctttatggaatcaaaagcatgcgccagaccataaaggagatcgaagtaaatgtggcatatcgttggttccttggtctggacatgttagatccagtcccccatttttccacctttgggaagaactatgcccggcgctttaaagatacggatctatttgaacagatctttactaaaatcctggaagaatgtatgaagtttcatctgatagatacttccgttgtctttgtagattccactcatgtaaaagcatgtgcaaacagtaaaaagatgcgaaaacgtgttgcggcgcagcaggctctttggtacgaagaggaactaaaaaaagagatccttcaggatcgaaaaaaacatggcaaaaagccgctgaaagataaggatgacaagacgccacctacacaggccggaggtggaacgggagaaggggtcccggaagaggagatcccggaaggggccaaaacgcagaaatgcagtacaagtgatccggaaagcgggtggttccgcaaaggagagcataaacatacctttgcctatgcagtggaaacagcatgtgaccgttatggatggatacttggatatacggtacatccgggaaatgaacatgacagccggacttttaaagccttgtatgacagactaaccgaatggatgcgtccagaaaggatggtcatggacgctggatatcggaccccagcgatcgcacataggcttttgacagatgggatcgaaccgcttttcccatacaaaaggcctgcgacaaaaaaaggatttttcaaaaagtatgactatgtttatgacgaatactatgactgttacctatgcccggaggatgaagttttaagctaccgtacaacaaaccgggaagggtaccgggaatataaaagcgaccctcagatatgcgggagctgccccagtctttcccaatgtacagaaagcaaaacgcatgaaaagatggtgacaagacatatatgggaagaagaactggacagatgtgaagatatcagatatacgattggaaacagggagatctatggaaagagaaaggagactatagaacgcgtatttgggacggcaaaagaacaacacggttttcgttatacccaatctgtgggaaaagcccaaatggaactaaaaactgggctcacttttgcatgcatgaacttgaaaaagttagcaaagatcctggcaaacagagaggaaaaaggagcccctgcgcaaagcgttctcttactttgggtttacaaaattgaaacgacacttcgaaacaaaagatggtgttggagcaaggcctcaacaccatctttgtctacagtctgaaaagagatggggacggaggttttttaaaaaacctccgtccccatctctttttgctgtatattttttgtcattcagggttgcttttttttcatattgggtataatatactcatatagataatgtagtattaaaaactacatgtcgattcatcaacatttcaggaggctgtaacatggcagaaataatcaaaacacacattaaagatccgggaagcgcgatcacacattttattggtatgctgatggcaatttttgcggctgtacctttattgataaaagctgctcacgaaccaagcagaatatacatgatctcaattacagtatatgcgataagccttatattactatatgcggcaagcactacttaccatacgtttaataaatccgaaaaagtcaataccattttgaagaagatagaccacatgatgatcagtatattgatcgcaggcagttacacacctatctgtctgttagttttgaagggaaagcttggaatcatactattatctgtcgtatggggaattgctattgttggtattcttatcaaagcattttgggtatactgcccgaaatggatatcttctgtattgtatatcggcatgggatggacatgtgtactggcatttactcagatacttaattccctgtccccggctgcgttcggctggcttctggccggaggtataatttatacgatcggcggtgttatttacgcattaaaacttcctatatttaatacacggcacaaatactttgggagtcatgaaattttccacctgtttgtgatgggcggaagtatatgccactttatactcatgtatgtatttatactgtaaagctgcggggaaaaggaaatggggacggaggttttttaaaaaacctccgtccccatttccttttcccctgtccctttttactttcctgcttccttcaccagcacttctttttcttcccgtctcatatgcttaattgcatattccctgctcatggcttcctcttttgtccggaactcctcataatataccagttcgaccggccttcgcacccgggtatatttactccccttgccgctgttatgagccttgacacgcttgtccagatcattcgtccagccagtatataatgtaccatccttgcattttagtatatatgtataattcataaaacagaatcctttcaactgatgtctcttattatatgccttgtccttatacttcgcaaccgccggggacatggatattttaaaaagggacaccgtaaaatgagttggggacggaggttttttaaaaaaaccccgtccccaactcacctcaactcattttactctgccaggtattccattggattgactggttgtccgtcttttctcatttcaaagtatacgttgctgccttctacgctgtagtattttgtcggctggctgatatagccgagcacgcttttggcttctacataatctcctacttttaccggtacttctttcagctgtccgtagaagagttcgtaaccgttaccgatatctacgtttactgttgtccctgtctctgcgctcacgtcgatggattttatgattccaggtgccgcagatataacctggtcgccttcggcgcctgagatgactaatgcaggattatatttatactgatccagtgtagaaaaatacactgtcttatccatgctgtagttcatcaggatgttgccgtttaccggccacaacagctggctgtcttctgtaaaatgtacagatgttcctgaccccgccgtcgcctgagtattttgattttcgtttgcagctgctccgtttgccgtgtcccccgagttttcgtccgtattctgtttgtcatcattttctgttgtattaatgacaaggtcattgttcgctgtctcggttggttcttctgttttttcttcttttgtctcattggtttcttccgcctgcgcaagctgttgttcctgctgggtttttctataatccctgaatgtatatgttccaactattgcgattgctgccacaaaacaaactactactgcggcggtagcaccttttcttttccttgctggtctttgcctcttattcattttttatcaccacctctgactatatttttgccagatagtgatatagttattccgtgtctatcaatatttctgctacttcttttatttctgttccttcaaaaaatttttgcagtatctctttatagtctttccccttttttgccatttcatttgccgtatactggctcattccaagaccgtgcccgacgcctcttgtcgttatcctcagttttccgttatatttctgtaaggtaaagcagccagacgccagaccatatgtagtgcggaattcttctccgcttatattttcctgtccgacacgtacgctcgtcacatagcctgcagtgtcataggcagtcacctctgcgtccatatcatctatggtcacagtctggatctgttcttccgcctctatatcgagcggacagtccacgatcttaagatacgggtaatcctcgcttccaagcgcttcttttccgtcgcgtgtgcttccgttgctgatacggaaaaagggtgtcaccgccaggttttcaccgtacatgagtacctggccttcggtttcattccacgcttttttcagcctgtcgtagtatttggaatatttactaatcccccatgcatcttccatctgttttgtcgtccagaagtcatcggccagcacggtatcactgcccgattccctgatttttttatacacatctgtccgcacaagtatggcctgggcctttagcgcctctgtcttataggacgccgggatctcccttgccagaacgccgatgcagtattcttcgatcggcatcttcacttcctccttggaggctgtcttgactttgacatacgtgctgtccacatgagaggtagctgtaatgcttggcccatttaaaaacacagtcactacatacggtaataaaattatgataatcagataacatccccattgttttagtctttgccgcataaaaataccctcccatacactgtatggaagggtatttggatttattccctgtttctgataataaagaaataaactgccgtatacaatgggacaaatatgcccagaaccgcatgcattaccgcataattgccgtccgtataccttttatatatctgccggttcacaagtacggtaagcgttttttgtacagctgacgcggccagagtgaagagaccgagccccagaagagccagcagcatgatcccgctgccgaatccggaaaacatgttgtaaaatggataataagaattaattgcctgatcagccatccggacaatattcaccagcactccgccccagactatagccgtaaatataccggtgatcactccggatgctatcggtatcacaagcatccatatcccgggattatccatcctgcggtccttgaatgccagcgggccgcacagctctccctggtaatatactcttgcatatggtataaatgcaagccacggatatttcattcctctgtttttgccgagtgtatacataccgataccctgcagaatataagctgccagtgcggcaatgccaataacgccgagaacgagtaaataaatgagcaatattactgccagaccattgctttcatacataatcatacctccacagtaagtttatcgaggtgccatatatccttaacatattcttcgatcgtacggtcggaagaaaatttcccgcagctcgccgtgttgagaagcgccatttttgcccatctgccgcggtctctgtacgctgcctcaaccttctcctgtgcctctgcatacgccctgaaatccttcaggataaaatacatatctgctctgctgctgctctttgtattaagaagagaattatacaggtcgcgatacatctcccggttgccgtatccgtacgtgccgtccaccagctgatcgactacacggcggatctcatgatcactgttgtaaatgtcgacgggattgtaacctccgtgctgctcaaagctgataacttcatctgaactcagaccgaagataaaggcattttcaatacccacttcctgcacgatctccacgttggcgccgtccattgtaccgagcgtaggcgctccattcagcatgaatttcatattacccgttccggatgcctcctttgacgcggtggagatctgctcgctcacatcagcgcctgcaaataatagctctgcattggatacacggtaatcttctataaacactaccttgagctttccgttgatgctcctgtcattgttgacaacatccgccactgaattgataagcttaatgatctgttttgcgcgtatatagcctgcggatgccttggcaccgaagataaatgtcctcggataaaagctccgttccggatgctccttgatctgattataaagatacatcacatgcagaatgttcagaagctggcgcttatactcatgaagacgcttcacctgtacgtcaaagatagagcgcgggtcgatctcgattccattatgttccagaatatattgtgccagacgctctttatttttatacttaatgctcataaattccttgagcgcctcttcgtcatcagcccatttccttagtccggacatgagtgataagtccgttgcccagtcctttgttccgagcttttcagtcacccagtcggcgagcagcggatttccgtgcagcaggaaacgtctctgtgtaataccgttcgtcttattgttgaacttggacggcatcatttcatagaaatcacgcagttcctgctttttaagtatttctgtatgaagggccgcgacaccatttacagaatagcctgtaacgatcgcaagatgagccatcttcacctggccgtccatgagaatagccattctctttactttgccctcatctcccggatactgactccgtatctgctctacaaaacggcggtcaatttcctgtatgatctgatatacacgcggaagcagcctggagaagagatcgatcggccatttctccagcgcctctgccataatagtgtggttcgtgtacgcacatgtatgtgtcgtgatctcccacgcctcgttccatccaaggccttcctcgtcaagcagaatacgcataagttctgccaccgcgactgtcggatgcgtgtcattcatctggaaggtgaccttctccggcagcttatggatgtcatcgtgcgtcattttatatttggacagcgcctgctgtatgcttgcggaaataaagaaatactgctgtttcagtctcagctcttttcctgcatagtggttgtcgttcggataaagcacttctacaatgttctttgccaggttctcctgttccacagccttgtggtaatcgccgcggtcgaactcatccagctggaagtctacgatcggctccgcatcccatatacggagtgtattgaccatgtggttattatagccgacgatcggcatatcataaggaaccgcgcgaacagattcataatgctcctgtacaaaatgcgtttttccttcctcgtcatattctacacggatatttccgccaaaacgtacttctttggcatattcaggccgcctcagctcaaatggattgccgttcttaagccagttatccggagtctccacctggtatccatcctcgatcttctgtttgaacataccgtagcggtaacggatgccgcacccgtaagcggcatagccaagtgttgccagtgaatcaaggaaacaggcggcaagacggcccaggccgccattgccaagagccgcgtccggctcctcattttccacggcattcaagtcaatgcccatttcatccagcgcttccgccacttccttgtaagctgtcatattgatcaggttatttccaagcgccctgcccataagaaattccatggacatataatacacgatcttgggatcctgctctttatacgccttctgtgtggcgatccagtcatcaatgatgacttctttgaccgcataggaaaccgcctgaaacagctgctgaggagtcgcctcatcgacagttttgcggaataacgtctttacattatttgtaacttctctcttaaacttttctttttcaaatatcggattatacatattttcccctttacttcttctgaacacctaatgttacctcttctccgttaattttccagtcttttacaaagcctgccggggttgtcttcgtcattttaacggtgagtgtctcctctgcaatgatcttcgcattctcggcaaataccttttctgccttttctgttccttcatacgttacttcaattttatccatcacttcaaaatcagcttccttgcgcatcgtctgtatcttactgataatctcgcggacaaatccttcctccagcagttcatcggaaaggtttgtatccagtacaacggtaatgccattgtcattttctgacacatatccttctgtctgggcagtctcgattaacagatcctcccggaataacgtgacctcctgtccgttgatgtcaagcttcagggcatcggatgcgttcagctcatccatggctgcgtttccgtccagagactcaagcgctgctttaatgcctcctaacagtttaccatattttggtccgactgtctttagctgaggtttaaaactgtaagaagtaaagtctcgtacctcttgtgtaaatgtcatagtttttatattcagctcatctgtcacaatgtcctgatagaacacagggagctcaaaatcagccttcacatacatctgtccgatcggctgccggtttttgatattggctgtattacggcatgcgcgccccataacgacgagcttcagcaccttctccatgttggactcaagttctgtgtcaatgcatctttcatctacaagagggaaatcacacaagtgtatactctccggtgcgtccttgtctatacttctcacgagattctggtagatatcttctgccatgaacggaatcatcggcgccgctgccttgcagactgtgacaagcgctgtataaagtgtcatataagcattgatcttatcgtgttccatgccttttgcccagaaacgttcacggcttcttctcacataccagttgctcatgtcgtccacaaaatcctgaagcgctcttgctgcctccggtatgcggtaattctccaggtcattgtctacttccttcacaagtgtattcatcttggaaagcagccatttgtccatgacagacaatttgtcgtattccagcgcatattttgtcgcatcgaattcatcgatattcgcatacagtacaaagaaggcatacgtattccagagcgtgcccataaacttacgctgtccctctgtcactgccttgccgtggaaacggtttggaagccatggggcactgttcacatagaagtaccagcggatcgcatccgcgccgtatttttcaagtgcgtcaaacggatctactgcatttcccttggacttgctcatcttctggccgttctcgtcctgcacgtggccgagtacgatgacattcttatacggagctttattaaatatgagcgtagagatagccagcagagaatagaaccatcctctcgtctggtcaacagcctcagaaataaagtccgccgggaactgcttttcaaaaagctctttattttcaaacggatagtggtgctgtgcaaacggcatggcgccggaatcgaaccagcagtcgataacttccggcacacggtgcatctctttgccgcactctggacattttaccgtaacttcatctatatatggacggtggagctcaatatcgtccgggcagttgtcagacatggacttcagctcctcaatactgccgacagaatgctggtgtccgcattcacattcccaaatattcagcggtgttccccagtaacggttgcggcttatgccccagtcctgcacattttccagccagtcaccgaaacggcccttgccgatgctctccggaatccagttgatcgtgttgttatttgcgatcaggtcatcctttaccgctgtcatattgatgaaccatgattcacgcgcatagtagatgagaggtgtgtcacatctccagcagtggggatagctgtgctcaaacttcggagcctcaaacaacagcccctgttcttccagatctttcaatacgagcggatccgctttcttcacaaacacgcccgcgtaaggcgtcgactctcccatgttgcccttctcatcgacaagctgtacaaacggcatgtcatatttgcgtcctaccttagcatcatcctcaccaaaagccggggcaatatggacaacaccggttccgtctgtcagtgttacgtaagagtcacaggtgacaaagaacgcttttttcttctgcttcttcgcacattccgcggcacaggaaaacagtggttcgtattccttatattccaggtcctctcctttatatcgttccagaacctcataagctgactctccctcttccgcaagcctgccgagcactttatcaagcagcgcctctgccatatagtatacatacccgtcggcagccttcaccttcacataatcctccgccggattcacgcagagtccgatattggacggcagtgtccatggggttgtcgtccatgcaagaatatacgcgtcctcatctttcactttaaagcgcacgatagcggaacgctctttcacatccttatatccttgtgctacttcctgggcggaaagcggcgtgccgcagcgcgggcagtaaggaacgatcttgaagcctttgtataagagccccttatcccagatctgcttaagggcccaccactcagattcaatataatcgttgtggtacgtcacgtacggattatccatgtcggcccagaaaccaactgtattggagaaatcctcccacattcctttatatttccacacactttctttacacttgtcgataaacggctccagaccatattcctcgatctgctctttgccgtccaggccgagaagcttctccacctccagctccaccggaagaccgtgggtatcccatcccgcttttctcggcacttcatatcccttcatagtacggtatctaggaatcatatccttgatgacacgggtaagtacatggccgatgtgcggtttgccgttggccgtcggaggaccgtcataaaacatgtaaatgtcgttgccgtccttctccttcatacttttctcaaagatgttgttctcttcccagaacttctccgtcgctttttccctttcaacaaaattcagatccgttgaaacctttttatacatttctcttcctccttgagcattggggacacgtttttttcccgttggggacggggtatttctaaaaaacctccgtccccaatttaattcagggtgtccctttttcattaattttaatattgggtcaaaaaaaacttccgtcctgaataggacgaaagctaaagcctcgtttataaaccacctaaacatactgtcatatgccttccctgtaacgggggaactccgtcggcatctattgggtattcatacctttcgacgaccgcaactcggaagtgatattcagatataacttaccggcgccaggcttccaccatccccgactctctattgctttccgaaatatcttactgtcttcgtcaacatttttttatattctgctttattatagtaagaaaacccttgatagtcaagggttttctccattttaacgttatttggcgtacgttattgcgcatttataacagtggtgattttatcgaacataccgggcagcaatgctccggtttacacggtggctccggtctgcacggcggctccggcttacagggcggttccggtctgcagggcggttcctgcttacagggcggctctggcctgcacggtggttccggtctacatggcggctccggcttacagggcggttccggtctgcagggcggttccggtctgcacggtggttccggtttacagggtggttccggtctgcatggcggctccggcttacagggcggctccggtctgcacggcggttccggcgggtatggcggccatggcgggtacggcggtcttggcggccatggcggctccggcggatacggcggcctcggtgggtacggcggctccggcggatacggcggataaggtggatacggcagttcaggcggacgtccccagcccggataacatggcatcatacatggaaatggaaccggaaatcctcctgccccgcacgaattatttgtgttattgttattattattgttgttattattgttgatattaataccagcatatccgccctgccctttggatacggaacagtccgcagacggatattctgcgcatacacagagttcggcttcctggccgatctgcacatcatcaaaagatgttccgatcggctggtaattcagggcggtgctctgtgcctccatagtgatcaccctcgttatcgtacctgtaaaagatgccttaacggtaaaacaggcatacttgccgcacgtgcgcagggcgatatagaattcctgcccaattaccggatcggagatcggattgccgcagaaatccataaacgttaccgaataatcttccctgcagctgcaaaacggtgtgacagtgatctccggacggccgtcaaagctggacagtatcctaaacggccctatcagcattctgccgcatactgttcggacctcatccggacatcctttgaaaataaaatacggggctgttgtatcggtcggaagaacactcttgttgcagcacttgataccacagtcacccgtgcagcattgatcgttcggtgtcagtgacggaacaggaacgtccggttccgcgtctacataatcccccgccagtttaagaagcgcaagcactgccgcgcgcattctgtccgacttgggatgttcattatcgtcggcacagtcgagaaaataaacttcatccggcgcgatctgacccaggagcacccagagggcagtctgaacaacggcatatgcgtcattgtcatccagcgccggactggcattcggatctacccctgccagtgcaaatgttgcagcagcgctgaccgcaggataggtatttgccaaaatccagccgagcatctccttctgccgctctgtagcagccggaaacagtgtttcaaaagggcggctttcataaggcacgtcattgtagggtccatccgcaaatttgtccagacaatagacaggcttattcgtactgcccagcagatttccaaaaaactgaaatatctgattgtggtcatctctgttcagccggtatctggatgcagaagtataatcaagcgaacaatagctttctacgctcggattgccgcccacagttccgctgatatcccggtcagaataaataataaaaggacgtgtgtcccttagttcttctatatcaatcatgaaaattcctccttacttatagattggaataagaagattcttacataattaagatatgctgcatctgtggccgtgttccttaccctatattataagaaataaggccattgtcactgactggatcccagcatagacaatggccttgtttcttttgtttatttgcttgtttctcgtacagatctatctgcggcgcctttttctccggcgtcttctctgcttttttatcatccttctgatataaaacacaaggagcagtatacctgcggcagcgacaacaattgcaaatgtcagctttttcccgctgctcttttccttattttcttccttctccgttgtcctgatcttcgccgaatgatcctttatatacgatttactcagcttagctcgtgcgctgcccaccgtgtatcctttatatgaataggtaagtacagcctctcccctggcattttcatctgccttcagtttcatatccaggtctttaaattttatgccttcgggaagcatgacgtaaccgtccccatcactgtctatgatgctctccacatccttggaatcctcttcccctgccgccgctgtctttgtaaaattactgaacccatagtccagcagattctttgtgtcagaatagatattggagccgtgcgtcctcagcaccacgcacacaagccgcaccccgtccttctcagccatcgtgatcagggtggacagcgcatccgatgtatatcctgtcttccctccgaccgcatactcataatagtttgaatttcccggaatgagcatcttgtgcttctgctgaaaaatatgttcctcgcatgtatccgtcgccggtattgcatagtttaacgtctgtacaatatcaaaaaattccggatgcttaaacagttccctgccaataagcgccatatccctcgcacatgtataatggttctcatcgtgcagcccattcgtattggcaaaatgagaattttccccgccaagctctttacaccttgcattcatctgttctaaaaaccagttataatcatgtcctgcattcctgcccacactttctcccaccgcataggccgcctcattggcagacgcaagtaaggttgcatgcagcgcctcatccaaactgacaatatctccttccttcattccgatggaggaatccccgggctgaagaaatgccacactgtcatgtgtaaatgtcacttcatctgtaagctgtccgttctctaacgcgacaagcgcagtcagcacttttgttatacttgcaggaaattcatgttcgtcaatattcttggcatacaatatggcccctgtcccgacttccatgacgattcccgcttctccatatgtagccggacctttgggccacttcttcagttcatttgtctgaacaggcatctcgtatgcctcacgctctgccttctgttcaggtgtctcttcttctgcagcagcattttctgtctccggctctgctgcatatgcaatatttatagtgctggtaaatgctaccgcaagcgtcattaaaataatcagactccacctgctgcgcttcatatgtctgtcctcccagttttataatttaccgatataccagacaagcctgcccttcgtatccgaaatgctgacaggaccaaacatccgggaatcttcagaattctctctgttatcccccagtacaaatacttccccatctgtgacagtgatcggaaacacaatgccgtttttaacagccttcgtctcccccaaagcccacggttcttcccgctcttttccgttcacatacagtctgccgccttctatgttgactgtatcgcctgccaccgccacaacacgtttcacaaactcttcatcattcggccggtcgatcgcaatgatatctcccggtgcataagccttctgcctgcgcttgtacacaaccatatccttatcgtgcagcgtcggatacatagactgtccttccacgtaggagatgcccatcacgatctgaaacaggccgcatatgacaactatgatcgcagcaaactccagtatcgtgcggagccagctcatcctgcgcatatgcttctttttcttcttcgtgggcggatccacgtcctccagtaccttctgcttcacctgctttatttcatctgcatccatatagcatatccttctttgataattttatctagattacattataaaggaaatatgaaaaattaacaagaacaaaggattatatatgcgaaaagccccccggactataaatccggagggctttttacatactatgactgaactgtatctacagtttcctgtgcaagtttgtcggctaactggtcttcaaaatctttttctcttttcttttgtttatgtctgtgtaccccaaagaccacgatcatcacaatgaggacaataagcgcgggcagatcccaggcacataatcccaacacactgtgtgaaaacatatattccagcatattttcttcctccttatcctattaagctgcttcgtctttttcaatttctttatctgccatggcgatctcttctcttaattcaaagattctctcctgacgctttttcatgcttctagtgtaaccaatctcaaccagcaatgcaagcaacagcagcaggaagtgaagaatacagcatttatggtctttggaagcccggttggccaacggcactccctcatcatctgactgaactaactgttgtacatttgcgcctacggcattaccgacattttgtacaaatgcggcgacaggttctgtgatcgtctgaataacagcagcgggtgttattgttccggcattggccggtgccgccgtatcattgccgcccggtgtcgttcctcccggattagttccggccggtgttacaggtgcggcgctccactgggcattcatgacaagtccgcctttggccatcttgatccagccgtttggctgatacagattttgattgtctgtaccactgctccagccgtcaaatacataaccttggtttacaaatccattagccttgaggacaacctgataatcaaccggataaatcgaattgtctaccgtctcgcctgtggcattctgtgcatttgcattataggtgaccgcgtactcctcagaatccggtattccatccggttttccttccggtccgttattatccagcacatagtatacattgataacattcgcatcttcattcgtacttatagttgtttcatatggcaggccaatatcatccaacatgtaattctgtccgtctctttcctttgtacccggcgtctttgcgcttacagtagaagaaaacggtgcattctcactgacggtctcgtcatctgccagattattgtcatagtagtaattaactgtatatttatagttattgacactaaaggttcccttgatcactacatcttttgccggcatcttgaagttatccggatgctgccatccgctgaacgtatagccttctttgtccggtgcgttcctcaaggtcacatcactgttatacacataactatctactgcgccatattgcacgtcatctacaagatatgtcaccttataagtattgatcgtgaagctgccgttgactactatgtcctcggtccccatcttatccggcagtgttctgtcccagccgctgaatgtgtagccttccttcgtcggttcttttctcagcccggcaatatctgctccatatttgtaagtgtctgtctttccatactgctggccgtctaccatataagttactgtgtgctcatctcttgtgtagtacagcttcaggacgagttttccgtctcctgtgatggttcctgttgttacgttcttctcagaattcttgtcataagtgaagcccgtaaaggtcgtcgggtttgccgttgctattgtatcagtctctccggtcttatcttcactctttccttctgtatactttccatccagaccttccaggtagtgttttactataaacttcgtatctccgttggctgtgaacgttcccgttatctccacgtcattggccggcatctcaaaggcttctttctggctccagccgctgaatgtgtagccctctttcactgcatccggctcaatgcttacctgctcgccgtatttatagctctgcgggcctgcgtatgccgctccgtccaccttgtaggtcacgttgtaactgttccttgtgtagtacagcttcagtgtcaggcttccgtcaccggctatcgttccggatgccagcggatcctccccggcttctgcatcatacgtatagccttcatacttcttcggagcttctgtcaccggcgttcctgtcgttccagtctcgtctctgccttccgccagtgtaaacgttccgttcaggttctctttataatgctctacccggtacttcgtatcatcgttggctatgatgcttccttcgatcttcacatcctttgccggcatcttgaagtcttccttctggctccagccgctgaagtgataacccgccggtacttccggcgccggtcttactgtcacgtcgcttccgtattcataacgctctgatgctccgtatggctgaccatccagctcgtatgtcacgttgtaactgttgaccttgaagctgccgctgactactatgtcctcggtacccatcttatccggcagtgttctgtcccagccgctgaatgtgtggccttccttcgtcggttcttttctcaagtctttcacggactcatcgtatttgtaagtgtctatctctccatactgctggccgtctaccatgtaagttactgtgtgctcatctcttgtatagtacagcttcaggacaagctttccgtctcctgtgatggttccttccgttacgttcttttcggaagtctcgtcataggtgaatcctgtaaaggtcgtcggatttgcagttgctatcgtatccgtctttccattcagaggctccgtcaggccttcctcatacttcccgtccaggccttccagatagtgtatcactgtatactttgtatctccattggctgtgaacgttcccgttatctccacgtcattggccggcatctcaaaggcttctttctggctccagccgctgaatgtgtagccctctttcactgcatccggctcaatgcttacctgctcgccgtatttatagctctgcgggcctgcgtatgccgctccgtccaccttgtaggtcacgttgtaactgttccttgtgtagtacagcttcagtgtcaggcttccgtcaccggctatcgttccggatgccagcggatcctccccggcttctgcatcatacgtatagccttcatacttcttcggagcttctgtcaccggcgttcctgtcgttccagtctcgtctctgccttccgccagtgtaaacgttccgttcaggttctctttataatgctctacccggtacttcgtatcatcgttggctatgatgcttccttcgatcttcacatcctttgccggcatcttgaagtcttccttctggctccagccgctgaagtgataacccgccggtacttccggcgccggtcttactgtcacgtcgcttccgtattcataacgctctgatgctccgtatggctgaccatccagctcgtatgtcacgttgtaactgttgaccttgaagctgccgctgactactatgtcctcggtacccatcttatccggcagtgttctgtcccagccgctgaatgtgtggccttccttcgtcggttcttttctcaagtctttcacggactcatcgtatttgtaagtgtctatctctccatactgctggccgtctaccatgtaagttactgtgtgctcatctcttgtatagtacagcttcaggacaagctttccgtctcctgtgatggttccttccgttacgttcttttcggaagtctcgtcataggtgaatcctgtaaaggtcgtcggatttgcagttgctatcgtatccgtctttccattcagaggctccgtcaggccttcctcatacttcccgtccaggccttccagatagtgtatcactgtatactttgtatctccgttggctgtgaacgttcccgttatctccacgtcattggccggcatctcaaaggcttctttctgactccagccgctgaatgtgtagccctctttcactgcatccggctcaatgcttacctgctcgccgtatttatagctctgcgggcctgcatatgccgctccgtccaccttgtaggtcacgttgtaactgttccttgtgtagtacagcttcagcgtcaggcttccgtctcccgctatcgttccagatgccagcggatcttccccggcttctgcatcatacgtatagccttcatacttcttcggttcttctgtcaccggcgtcccagtcgttccagtctcgtctctgccttccgccagtgtaaacgttccgttcaggttctctttataatgctctacccggtacttcgtatcatcgttggctatgatgcttccttcgatcttcacatcctctgcaggcatcttgaagtcttccttctggctccagccgctgaagtgataacccgccggtacttccggcgccggtcttattgacacgtcgcttccatattcataccgctctgtctctccatatggctgcccatccagctcgtatgccacgttgtagctgttgatcgtgaaactgccgctgatcactacgtcctcggttcccataacctccggcagttcaccgttccatccactgaacgtgtagccttccttcacaggttcctctctgagcggcgcagtattctgaccatatttataagtatctgtctctccatactgctgaccgtctaccatgtaagttactgtatgctcatctcttgtatagtacagcttcaggacgagttttccgtctcctgtgatggttccttccgttacgttcttctcagaatttttatcatacgtgaagcctgtaaagaatttctcatttgccgttgctactgtatcggtctctccggtccactcttcactctcttcttctacatactttccatccaggccttccagatagtgttttactgtatacttcgtatctccgttggctgtgaacgttcccgttatctctacatcgctggccggcatctcaaaggcttctttccggctccagccgctgaatgtgtagccctctttcactgcatccggctcaatgcttacctgctcaccgtatttatagctctgcgggcctgcatatgccgctccatccaccttgtaagtcacgttgtaactgttccttgtgtagtacagcttcagcgtcaggcttccgtctcccgctatcgttccagatgccagcggattctccccggcttctgcatcatacgtaaagccttcatattccttcgaagcttccgtcaccagcattcccgtcgttccagtctcatctctgccgtcttccagcgtaaacgttccgtccaggttctctttataatgctctacccggtacttcgtatcatcgttggctatgatgcttccttcgatcttcacatcctctgcaggcatcttgaagtcttccttctggctccagccgccgaagtgatagcccgcaggtacttccggcgccggtcttactgacacgtcgcttccatattcataccgctctgtctctccgtatggctgcccatccagctcatatgtcacgttgtagctgttgatcgtgaaactgccgctgatcactacgtcctcggttcccataacctccggcagtccaccgttccatccattgaacgtgtagccttccttcacaggttcctctctgagcggcgcagtattctgcccatatttataagtgtctgtctctccatactgctggccgtctaccatgtaagttactgtgtgttcatctcttgaataaaacagcttcaggacgagctttccgtctcctgtgatggttcctgactcaattgttcccgctacttcagggttaaaggtaaaccctgtatacgtcttccgtgtagcagttgccgttgcgccggtagttccggtgaggttttcagtctctgtctctgtgtagtttccgttcagctgctcctgataatgttctaccgtatacgccgtgttggtatttgccgtccactgtgccgtatattgtgcattatctgtcacattctcagctacttcgccccatccggcaaatgtatagcccgggttccctgtcggctgcgctccaaatgccggagtcttaacgccgtagtctaaatcgtcatagaccttttcctggaatgttccctgcgttcccggtttatatactacactgaactgctgcttaaagtataccttcaatacaagggatccgtctccatttattgttccttctgtgacattgccctcatattcagaatcgtatacataaccggcccttgctgtcagagtatcatcggctgccagcttcgctgtgtctcctgttgttccgtatgcatctcttttgttttcggttgtttccggatatgttccttcgttttgatagtaatattctaccgtatattttgtattatccgcagctttccactgtgccacgtactccacagaagaagtcaccttatcggaataatccggcgcccagcctgcgaattcatagccggcttcaccctccgcagtaaatgccggtgtgtccgcattgtaactcagtccgctaaatgtcttgtcgtcaaacgttccgtgtgtcccgggcttatatgtgacactgaactgctgcttaaagtataccttcagcacaagactgccatcgccctgaatgactcctgattcgatagttccgggggcgtccttatcatacacataccctggtctgtctgtacttctgtactctattgtgtctgcgagctgtcctgttgtgccttcaccggggagtatctcatccggctctgctttgtagcttccgtccgtctcataaaagcgctggacagtataggcggtatctgtattcgcagcataatatacttttacagtggctccgttctttacagtctctccgatttctttcgggtctgtccctgtaaagtgataccccggatatttcccatccgatgtgtcgatatcattcggaagtacaggtatctcatcatcattgatccagacatttctctttatctctttcgtatcgccggttacaatgacgccgtctttataatactctaccgtatatttaagctcatggacactcagatcatcttttacgcatacggccttaagctcagtatctttgtctcccattgtatagcttccgcttaccgtctctccggctgcgttctcccaatggtcaaacttataacccgtatctgccgcaagacctgtgtcattaaaagacttgaccgccgcagaatctcctttgaaatagtaagcgtcaaagtatgcatcaccgctgctgtgatctcctgcaacataagtcagcttatgggcggcttccgctgtcacgtgatatcttatatcatcgccgtcctgtattgcatacgcatcgagatcatcgatcgtctcccattccttggttttactgtgaagcacctgaatctcataactgtcgtaccggtctgtttcttccgttataccgtatgcctcatccgcatatgccttgatctgttccgcactgtagccttctttgttgtcggaatcgatctctttggaatacttgtttaatgaaccgtccgttgacaacttaccgtcactcgtaattacgtatgcgacgctgttttgctctgctttgtaaaaccatacggataccgtcgctttatttgcagtccactcagctgtgtacgttatgttgccgcttaccttttcctttacttccggattccagcctttgaacgtatacccatcttctgctgccgtttcgccgtcaaacttcggtgtcgcttcaccataatattgtttgtcatatacctgggcttcaaatgctccgtgggtccccgggtcgtaagtaacggtaaactgcttcttataatatcttttcagaacaaggctgccgtccgcttttacttcgcctgtagaaacatttaacttatgctcttcatcatatgtgtagccatcgattccgatctcaccggaattgacgattgctcctgtcgttccttcccggatatctgttctggaagcgctgtccggataagttccgtcatcgttctgcagataatattcaatcacatatttcgtatcgcctttcggcagccactgtgcatagagtgtcgtatcctcactgatagtaaaggtttcaccgcctgcgtaggtcgttccgctgccatctgcttttgtattccaggaatcaaagttatatccttcacgcactggtatttttgtgcttactgttgcagatgagtcttttatatactgttttccgtccggcatattatcccaccctgccggtgcgttggcattgtaggacagacttactttgctcttctccaaaagtacgccgtctacatgccagttatcctggtgcttgatcacataccacagtacaaactgggtagacggatcatatttattgtaaaccttctttatctgcgcgtctgtcggagttttgcttaacatatccgcaactcccggcggcgtagtgttggcatagaacgctcctactttaatcgcattattcatagatatggcactggtatattcagctgccgcatgaccctgaggttctgtaggaatgaccccgtctttacgtatataaaaatctgcatttaagttttgagctgcccatattgcatacagtgtaacatttttggccggcataagataactgcttcctgccgggtagaccggaacggtataatggtcgtttcctgcagcgacagcattcttatcggtactccaaccgacaaataatcttccatccacgctccctttgtagttcggaagagttatctgggagcctgccgtcgtatttacttcctccggtgctgcctccccttttccgccattgacattaaaggtcaatttatacgcgtctgcaacgttaactacataaggctctgaagacacagttcccgcacttgccgtgatcttcgtagcaccagcctttaacgccgtaacctttccatccttagaaacctttgcgacttccgggttgcttgacgcccatgtcacttcatatccggcaggatctgtgaccgccgtcagctggagcggctcatctgctttcgtcatcgtctgtgattccccggtaactttgacagatgaaacttgctgtctgtccttgatcttaatataaaaatgttcctctctctcactcaaagactgacttgaatcataattgtattcgtatctatgggttatctttattatcgagtcacttgcctttaatgcttttacatccgccgaatagtcttttttatctgttatctttattttatcagcatctgtatctgaaatttcccattcatgacctttcgcctcgttatgccattcaccgccacgggtactcttgagagtgatctcatcatttacatacatttcatatgcctgggaaggatcatttatccgctcatcatgatatgtatgatgctgctcgtgatcgtggtacttatcacaaaagtgatgcctatcttcaatcaggtattccgccagctcggaagcgagatgacaggattttccaaagccatactgaacctcggaactgcactgaaccgttattctgtcatattcatagccgcgctcgttattctcattatttttgtcattcttatcacgcgcacaaagagcggacgcgccgcattcgggcggtttaccggaaggttcgcgtggacgcgctctgtatctgaaaagatggctgcctgcagatttgccagcgggatggcactgacactgagcagcggaatgactcagtctgagtgcctggaacttacgtcaaaacttacggataatgaaaatttccgtcagaagctggaacaatgccagatcaaaatgcaggaaggtgaggatctgtcacaggtactgcttgaaatggaagtcttttccgggatatatgcccgcatggcttctatcggctcaaaggccggtgtcctggatgaagtcatgagcgacatcgccgaccggtatcaggaggagatcgaccagagatttacgaacattatcgctacacttgaaccgacgcttgtcattatactttcactgatcgtgggaatgatcctgctgtctgtaatgcttccgttaatgggaatcatgtccagtatataagagattggggtaatctgcatgaaacaacgttttgtatccaataagaccgggtcaaacaacagaaactttattgtttccatcatagtgtttttcatcatcttcgggtgtttttcgtttggcatatcaaccttttcagacaaagcatctgagcaggaaaagcagacgcttgaaacggcggtaaaccgcggtattgcccactgctatgccattgaggggacttatccggaaagtctgcggtatctggaggaacattatggacttatctatgatgaggaccgattttttatagactatcagatactcggttccaatattatgcctgatgtaacgattattgataaggaggaccggcaatgaaattccagacccgccagaggcatgtgatcgaccttatatttccaatagcgcttttctttgtcttcgcggcatcctctcttgccgttctgcttctggctgccaatttatatggttccacaacaggacagatccaggccaatgaccagaaccggacgtgcctttcctatatcgctgaaaaaataagacagaacgacagcgacagggccgtttcgatacagagtatagatgacacggaatgtctggcgctgcgcggcaattataacggcgttgcctgcactacgtatatatacgaactggacggttccttaaaagaactgttcataaatgatggtgtagatatatctctgaaaaacggaaaaacgataatggagatcgagcgtctccgtatggatgagacgggggacgggatctttcactttgcgtcaactgacaagaaagggaatgaggattcccttatcatctcagaaaggagcgagttatgaaaaaacaggcttccaaccgctccgggctgcttctgatggaaattatcatagcgatactgttcttctccgtgatcagcgccatatgtctgcagctcttcgtcaagtcacatacgctcagtcgggatactgaggtgctggacagcgcggtaaatgagacgagctccgcagccgagctgctccacagtacagaagatgcagaatcagcgctccgagagtattatccggccttgaagaaagaagacagcaggttgtatatttattatgacgaggcatttaaggcatgcactgagacagatgcggtctattatatggaaataaaaaaagagtcggcggaaaacgggatctttgaatataaacttactgtgaacaaatccggctcctcctcacatatatatgaaatggaatatgtaacatacgagccgttaaaaccataggaaaggagccgccatgaaaaaaaagacatatcctgtgacaaatataggctccgtatctctgcttatggtgtttatcatactctgcctcgttacgtttgccaccttgtccttatcgagcgccgccggagactaccagtacagcagggatactgcccggcacaatacagaatattataatgcctgtaataaggcaacgctgaggctcaaagagatcgacaagcttcttgacgcggcttacacaggacgtccggatgattattatgcagaagctgccaaagccttagacacaatggacgggatcacttcggatttttcttcggaggaaccgtacttgtcctttgaagaaaagatagatgacaagaaagcactcaaagtcgtgattatattgaacggaaccgaccgcatttccggcggtttttaccgtatcagatcctggcaggaaatttcaactgccggctgggaaggaaatgaccgtcttaaattaattgaataggagatctttatcatgaatgcaactgatttttttgaaaatgccatagagaaaaaagcatccgacctttttataatcgcaggtcttcctgcttctatgagagtcaataacacgatcgtgcgcatcaacagtgacagactgctgcctggcgacacagaagagcttctgtgccagatatacaagcttgccggggaacgctccatgaacaagctcctggaaacaggagacgacgatttttcgttcgccattgcggggctgtcgcgttttcgtgtcagcgcgtacaagcagaggggcgccctgtcggctgttatccgtattatcacatttactctgccggatcctgcctctcttggcattacggacagtatcatgaaactggaccgttttccaaaaggtctcgtgctcgtaaccggtccggcaggcagtggaaaatcaaccacccttgcctgtatgatcgatgatatcaaccataattttgaaaaacatatcatcacgctggaggatcctctggaatatcttcaccgccatgataaaagcattgtaagccagagagagatcaatgtggataccgacagctatgtagctgccttaagggccgcgctccgtcagagccctgatgtcatacttcttggagaaatgcgcgattatgagactacgcaggtcgccatgacggcggcggagacaggacaccttattttctccactctgcatacgatcggaagcgccaatacgatagaccgtataatcgacgtatttccacctaaccagcagcgacagatagccgtccagctttccatggtccttcaggcggtcgtgtcacagcagcttgtacctgccgtggacggcagaatggtccctgcctttgagatcatgactgtcacacctgccatacggaatatgatacgggataacaagatccctcaaatagacggtattatctactcttccgcaaacgatgatatgatagcgatggatacaagccttcttcgcctctttaaggccggtacgatcacagaggagactgcgcttacctttgctacaaatccggacatgctcagcaagaaattaaaatagtttacaaagaaaggcttggatgtatcattgcatccaagcctgtacttttaagttaatgatttaccttgtgcattggataagaatctatattcagcttcagctcaaactgatacgatactactttgttaaagccctgtctgatacgttcccctatctttaccgcattttccccggaagtgctcaggaccatgagcagatactggctgctgctgtactgtgtaaatgcgtccccgcttctgagttcacttttaataacctgatataaaagttccatgagctcctctttgtcctcaggcagcacagggcttccgttttcctgatcatccaatgtcagaagaagtatatatgcactgtccttcgagcgctccagccctcttgcaacaaaccggtagatctgtctgaagctcatataatcctggagataagccccctttatctcgccttcctcggccagctcccggctgatgatctccatatcactgcagacatgtgcatcatcttcacattcacctctgcgcagttcaggtgtctttgtgattctgtctttctccataacgtatactcctttcgggctttctcttttcgtgccagtgcggcagaatacaatgaaacattatttttatcctcatacagattatacactatatttctcatccggtgtggtataaccgtgtcgtttaatgaatttgatatgtcattgcgcgtccttccaactattcaaaggacttaattattgaataatagagcattactaaacttgtactcagtaatacgccgccaataatatccgtaaaccaatgcacgcctgatatcgatcttgcaatcaccataagtaaggtaaataacaaaatagtatacttaacaacttttcttaccttctcattcttaatacgcctattcatttgcaaaatagctgttggcataacactcatgactaatagtgttgttgatgaaggataagacgcttcaagataaccattaattaagactggtctgtaattgattgcatacacctcgaacaaaatatacgcaatgaatactatgatgtagaaacctccaagagccaaaatgttacaatccacttttaacaagttttttctttttatcaactgcacaagtccaagtattgcaaatcctagtacaacaaacactggtattaatcccagccagtcagtaatggtataaataagcatatgcgttcccgtaagattatgaaagaatccattaaacgttgcaaaccctacttccgaatcctttggcccgactgcttgtacatctacatactgcactgccactgtccataacagaaaaaagagaaataaacctcctgctataataaaatttttatgattactttttttcatactttatccatcctttcatgtttggcttatgtctaaacacaatatagtggatggtataaaaaaatgtaagaattaatatgtcacatatctgatacgattcgtgtcatgcccattttataagtaataaagcctttatactcataaaaatcagtataaacattccagcatacggttgaaggctaagcataaaagataacgtcgccaatacactcaagcctaaagataatttgctttttgttgctatccataagggtgttgtacaattttgaagtgccaacgtcaataccccacataatataattccaatcacaataaccatgtaaggaatgattatataactttcagcttttgtaaaagataacaacgaaactgactctattacatttccaacatcctgtccgaatattggaaggaaaaaaaatgacgctacagaacaatccagtaatccgaaagtcaaatctataaagtgatgaatttttcggtcagtatcctcttgtgcagcgtttaggatttcttcacttgagagcaaatcatcaagtgatattgtaaaaaacttagatatttcttttaatgaatcaatgcttggatatcctctacctgattcccatttagaaattgctgttcttgatacagacaaaatttcagcaagttgttcttgtgtcaaatttttactctttcggagtttctgtaacttttcattaaattccaattttgccatcccttcttcaccaaatgttaatttatctgccccgagctctaatgttccaggggaggctccttgctgttcatccgcagggtacggcggatcctgtttaaagattcttttttgaaggctgtattcacggcgcattttataaataaccgtctgttgcagcatttcggtataaaacatattgctgcgccggctgcctgattatggatctcggaggggcagatgtcccctccggcacaaatatggcttcatatgaaaaaatctccattcaaaggctttttccagtctaagaaactgaaaattatcgtatcttacctatatagcggcacaccttctttttatattgcacatactcgtctccaaatgtggtaagtaaaaactcttcctccacattaacgatttgtaagtggtacatgagaatggcaaatacggacacaacaaacaaaacccagttgaaaaacatcagtaatatgcctatatacaaaaggtcgaagcctaaaaaagcgggatttctgctgaattgatagatgccgcctgtcacaagatctgttttgtcagtttgagccacaccagcccgccaattatcacgcatagtcaaaactgcagcaatgaatacagctgtacccgcaatactcactacagcgccagcgatccgaaacgggacagggctataatttacatcaagaaagatacatacgatccctgccgcaaagacaagaaaggctgaaatcttcatggtgacttcaaccaactttacaaagccggccttgccttttccaatttggtctgtttgtatgcccttctttttctgacagatcatttttacaatataacagccatagaagctgaccaggaccactatggcaatcaactgaaactccattatttttctccctccggctttatatttttttcctagataagctgaattttagctattcagcagtttagttaaatcttctatagaagcatccatttttacagatacgtcttccatagtcataccagaagcgagaaaacggtttatcaccattttcatatcttcaccaacttctatgatatggccgtctaaatcgtaaaatctaatgacacgctgtccccattcatgctcaatgactccgcctaaatactcgatgttactgaacatttttaacttatttaagaaaccgtcaaagtcttgttcttcaaagcatatctctatattattggatttccttaatatgcattcttccggtaaattgaccagccaatgaaaatcctgctgtaaagataagccacaagtaaaagatatattgattccataatcctgatataattccagtccaaataaatcctcgtaaaactttctggcagccttgatgtctgctactgatataaccatacatgtgtgtttcatacaattttcctttcagttccaaatttattctttatttccatgttgatggataatctaaatgacagggtaattttgtattacggtttccttttgcagaattaacttgtccttgcgttaaaaagacagcttcgcttagatccgcattattaaagtttgtatctcttgtgtcggctcctaaaaaaatcgttccatgaaaaaggcatttttcaaaatttgcggctattaaaagttttgagctgaggtctgctccactcatgtcgcgtcctttaaaattacccccaagaaaattagccgggacttttttatcttcgctatgaagactttgttgaagcagcttacacacttgttttaaaatatgattcgacctttgcctgtattgctctagatctaaagataagatactttcagggctataatggcacatttttatattttcctcaatcagacactgaatggattcttttaatggttgtgctgaaataagcgatgctgcttctatcagataatatctgatttgataaagcttaaacacatttataaaaacagcaaaaatttctgttgacctgtccggtatgtcattccaggtctggccttgatagataacctgtgtcacctgctgtcctgcgccgaagcagtcataaccaatacagcctttcattttctgcttttcaagctgcgaatgtattttacatcggtaatcgtttaataaatttgtacatggctgccctgctgctttatcttttggaaagccatctgtttttgaaaaaaacagagcagtacaacacagtcctgaacattttgaacaatccgccttcatgtggtcccatattttatcatttctttcatgtatcatcatctattttcaatcccatcaactattctctatttatcttccattattttacctgtctcaaatctattatataatggcccggtaacaaactgggagttatcgtttgcaaaataaaatattattaactcgttcggttatatatatttcatttcccactacttcaagttcataactctcaataatctctttatcgtgtttctttaataattcatcaaatccataagctgtatcttttttcttcggaaaccgaattgtgctgtcaaaagatttcttgaatcgcagcccatactttccgcatatttgtaaccattcatcttttgtataaaacttaatatgaccatcttttttttgctgcatgtatccatcaacaaaccggctcgtatcattgacgttaggtgtagggtctgaaataaacaagaagccatctgatttaataacacggctaatctcagaaatacttttttgtatatctggaaaatgatgcagcgcatatcttgaaataaccatgtcgaactcattatcagcaaatggaaaattgacaccatcataggttataaaactaatgttttggacattttcttcatttgccttaaaacgattgacttctaatgccttttcaacaatatctagtccaatgatagatatatttggatatttttttgcaataggaaaagacaaataaccacttcccgtacctaaatctaaaattttcatatccgcagaaaatggcagaaaatcaagaatatttttcaaatgatgttcatcttgtgtctgcttattgtaatagtcccccaaagaaaaactatcttcaaatccttgctttgtagccataatactgttttctatatccataatattcaattcctcttttcgtttacaaattctaatttataaccgccaccatatagtatcatttctggcatattctttgaaaccgcatcttattagaattctttgtgatgaagcaccatcaatatctgtttcagcaataatatgttttacgtcgtcctgcttaaaagcccaattacaaaacgcctgaaccgtttctgtcatataaccgttatgctcaaaattccgccctaagccatagcctatttcaacttctccatcactgttaggaacatccttaaaatcaattgatccaactacgcaacgatctgactttttaacaataaaccaaaaagtgtgccatagataattggcagggtctttttgagccttttctacttgtccgcatacaatttcacgaaacaagccctccattggttccgccttatatgaacatagtagttccttttcaagctctctaatgttatacgtccatagttcaagctgttctggagtaagtgcaataatattaagtcgctctgtttcgattctcattattctattccttcaataaattcaatattcccccactacaaactggaagttgtcgcaattttcttattccaataatcctcatttagacgatagcccactgctattttctttttaacttatacaaactcagatattactatctcattaccatcaatatcatttaggcgaacctcataagttccccaatcatatctaatagcttcagacaagtcgacaccttttttcttcagacattccatagttaaatctagattatctgtttgaaagacaaatgattgatgtcccgtaggctgtgcgtcaaatactttacaatcccatatacaaagagtgggtgcgttttctataaagccaagataaaccccatttgattcgtccacatcagtcttaataaagggtatttctaatatttccctgtagaacctaataagttcttttgcctgcttagaaaaaatattcgtacaatagtatcctgttatcatcatctcacctcatcaaatttaagtttagccattacttctttttaagttcagcaacagcgccataatgtaaaacatcaaactcagcaaacgaattttctgtgagtaatttcatatgttcctgttcccacatggcgatttcttcttccgtaagtgaagcgccgatcccccggcaggctttcattcttccattccagctttcacgagtgaaatgtacatataaaggatattcctcatgataaactaattcaaatttttcatcataacaatcaggtatgcatattggatgaatcgtttctcctgcaccactccacatcggactatatttcagcacaagattttcacttgctcctgcgattttatcctcataaggcagccaagccatatacaagacaagaatacgcccgtcaggtttaagcatacgataaaacttagacaccgtctcctcatgattaaagtaccaaaaacattggcatgcagtaattacatcaaatgactcatctggaaaattcacatcttctgctgataatgcatagtaatcaatatccataccctcagaaagaatttttgcctgttcaatttgatttacggatatatctgtacctgtccattttgctccatagtggtacatatttctgggcagaaccccagtcccggttcccatatcaagtaccttttgaccgtttatacataatttacggcttataattttatcataaaattcctgtggataaatatctctaaattttgcataatctgacgaagttttcccccagtcaaaggctttcccgccatcaatatttttatctgttatttccatgactgccacacctccaaattagaaatcggttattgtcttccttgccttataccaaatataaatacaactgcctaaagctatcatgtacgacacagtaagtacaagaaaagttgtgcctgcagggttcatcattttgtatacaggataaaacgacgcaataataaatatcggtatcacaattccatagactgcttttttccttgtagataaatatacatgagagccaagtaatactatcatcaacaaaaatgacagtaattctgtaatgttaaagccgccagtaaataatctcataacatatataaacaccatagcaattacaaagcatataaaagttgtcataagcaatctccttcttcttcaacaaacttaaatttgacattttaattatatcacacacccgcgaagtttatatcttattttactttcttcactgatgcttttgtta

SEQ ID NO: 427 - DNA, 804690 bp, Extibacter hylemonae
  source 1..804690: mol_type = genomic DNA
acggatactgacatatcatcttctaaaactagctttacagctgcgagtttaaattgtttatcataacttcttcttgccataaagtagaccacctttcattattttctcttatttttgtgtctactttattataccatgcccaacctagttgatagagtaatgtgtccagatttctgggtacatatcatttaggtctaacttttgggggggcggtacaatgtctgtgggtttccattcaataaaaatatgcaattgcttatctcttgcatagtttgaaagccttatttccaggcatttttgaaccatttgtcacttatgtgttagttactgatattctttcaaatatgcacatactacttctttctatatgcttatcgaactgctaatgttcaacaaggtacaaatcatgcaactttgctataatcaataatagaaatttcctgcatcactttctttgcctgctctacaatattttccaaccgtttcactacatctgccgtgtaaatcacatcattacattccgtacatttataacagggaacatttctgacaatcaccagacaacttcccaaatccgtcacatctgtcgtaaatcctttctcagcttttgcgccacattccatacataacatatttatcgctcctttctggtctttaaatcttcttcccattgagtagagtcaggataataagccgttatcaaataaaatcttcacttctgctaagtactatatgaatgtatttattatcagttgtttcccctaatattaaacaacttggcaatggtttatcatcctcatactgttcgacaatatctcctgtatcaatacaatgagtaatatcatccacttttattccacgttcttccaatcttttctttgcatgtttttgtaatggctattttctcaagtttattcatttccttaaagctatttatttgatacaatgccacccctccctgctcatttgttaatgtaagtatatcacagttatcccctcaaaaaaacccgcaaactcaatgtctgcgggttttccatatattgcaatatgcggttgcttatctctttgagaactgtggtgccctacgtgctgctttgagaccgtatttcactaagtctcagattcattttctcttgatatatagggggttttcgactttcgtcttaaaaattaacccgtaggttaacccagctttctgggtcgggtctgctcttgttgcagcggaaccggactctgtttgaacgcactatttaccacggcggccaattcattaggtctattatacttcactttttcgtcaatatcaattgttatcttactattctggtgccctgcaagatattgtactgtttttggatccaccaccgcataaatcagattcgtaatataagtgtgtctgagctgatgcggtgtcacatggaagtccagcatgtagacaacgttgttattgtgaacagccttttcaccaagaacaggctggatcgttcgcttgatcttttgaccgttacgtatctcacataggatcgccctttcgtaaatcgagtcacaatgtactgccatactctcttgaactgcgtatatgacaagaggcctccgtcccggttcgcaacaacaaagtcagagttggaatttgccttcgcttcacgcaaacattctgccaggcattccggaagcggcacatctcttcgggcagcctttgtcttcagctccttcaaggaacaccggacgtttatgttctgtatgccaggccctttttactgtcagatacggaacctcgacgtccaggaacacgcagtcccattgaagtgcaagaatttcttcacgtctaagtccagcgtaaagaccaatcatcacgaatacatagggaggtaatcctctgattgcatccagaagctgctctacctgatcaacggtaaaagcagccttttctttttcgggtattccacccttggcagagatcctcttcgttggatgcattgcaacttttctatctaaatttctcataataatcctcacacatgaacaacatccattattgatttcacacacttcacacgagaaaagattgtatgtttacagcccttctattgcactaagcagcatgttgcgatactcctctctaatatcagcaggtctttcgattttgaattttcctccagcaccgaatatccaacgatagaatgtaggactcggacacactttcaccgtcactcggaactgcttggcaccaacggactttgttttgattcccattccaaatttatcgacaacagatttcataagcatgttgtcgcaaagcatggtaacatcgacagtttcatcggtcacaaacatccggaatacttccgttgtatatcggaccgcatcgtaatcctccgacctatctacagctaccgcatccagaatctccggctacttcttgatatgatccacgcggaacgtacggacgccctcgcgttcatcacaatatcccgtcagataatagaagtcgccgtcccagatcaaatcaaaaggactaactgtgtaaggcttgccgttgttcttcagcacctgctttttccttccatcaagctcaaagtacaggaaagaaatctttctaccggcgttgatcgcatcaacaatgtaatagcccttttcgttgtctgacttcgctcttccggtgatatgtatgctgcgcttcaacttgtccgcattcgtctcactggtgagggagatcagcttttcaataagaatctcactccctcttctcggtaatgaatttggacgattgtactgcgtcgatcaggagcttaagctccggtcgggaaaaggttctatccgcgagatagtaattccatgcctgctttctttcagccataattttgaagcctgcatccttcagcagggcaatatccgatagcacggttgtccggtgcatgtggatcccatgcagttctttcatcttgttcgtgatctgcttcgtaatcagcggatgatcctcgtccgactgggagagaagaaggtgatacaggtaaagaatccggagacgagtatcgttttcgcttactatgtcggattcggcaccaagtataatgtttgtggtcttgcctgtcatattaaccttccgaaagaattatctatacttgtgttactatttagcccaaagggacctcgtccaaactatgcacgcaaatattgcgtatagtttgtgcgttacttgtttatcatttatgcatcctaatgattgttatttatacttaagcgtcattctcacacagcgagcttacgataatagctctctagtttttcatcacaaatctgtttgatttcttccttttcttgcagactcagatgcgtccaaacgctttcatctacccgaacgagacccagattttttgtgtggtagagcatccccatgtcttcaaatcgtttatatggatatattagaatattctgtaaaatctgtttgtccgtgatcgcttcatttaaatacacgctttttgctttttctacaataaggcctttatttctacgtccagcaaaataacttctaaaaaataacacgatatcagaaagtagtactcgcccttttttatcggcattaagtaaaatcgctttaattaagattggtttataggaatagctcatatccatctgacgaatcatatccataaacagatctttacgattcgaatcatcaatcaacgtccaaccatattgcaccgcgtacttttcaagagtctcctctttaaaatatttgaatgtacggtgttcactcataggcacactcaaatctggagttatttttccatcacggacatatttttcgattgtctctgattgcacatcgacacgacggataaactccatctgggaaaccatacccgcagcttcatcctgccaattaaaaatatccacaagttcatagtctgtagcgtctactggccaatcaataagagcttcgggcttttcaccctttgcatacagatcatcctctactgttttctcccccttgggaccaacagcttgctgaccggggcgataatccttcaacttaaacaggcgatgaatggaatatggcatattgtattgactagcattatccacaaagtcaaataccataagactttcttttccttcatacagacgcatacctcgtcccaactgctgggtgtatagtactttagacatagttgggcgtgccataaataaaacctcaatctctggacaatcccaaccctcattgagtaaatcgcatgcacagagcacttgaatctctcgttttacaaaacgtgcctgaaactccttacgctctgactgcttcattcctccggaaacaatggccgcattaatgccttgttcctgaaagagttccgcaatctgctgagcgtgctttactgaagcacagaacaccaccgtacgcttattccgaacatactgaagccatgtttccacaattaagcgatttcgctcaggaacatagagcttgctttccaggtcacgaatattatactgcacactgttaaaacgaacttttgtcaagtcaatattagtgtggatacggatgcaacgaatgggcactaactcaccaagctccactgctgtctgaatatccagtttgtgagcagtttttttgaaaatctctaaaatactcttgtcgtcagctcgttccggggttgcggtaaggcctaatgtaaaagatggcttgaaataggctaacaccctttggtatgtatctgcggaggcatgatgtgcctcatcaacgacaagataattaaagtcactatccttaaagttacccaaatgcaaagctacactctgtacactgccgcatacaatatgagtatcgtattctttaattccttcgcaaaatttacctacagatacttctggccaaatctctgcgaattttctcgctgcttgatcaacaagttcctgtgtatgagcaataaataacactcttcctccgcaacgcttggcatccatcactgctgttacggtttttcctgttccagtggcatgatagagaagagcaataaactcagacttgtcacgcatctcttgaagtgcaacaagggcttctttttgatgttccttgagttcgagactggcaccatcaagagctttacctttttgcaaagggagatagtcctcaatttccttaaactgcggatgatttcccaggaacactcttagttcatccttcacagtatccggctgcatctgcatctgacgcacagcccaacgatacacatcccagccgagatgcaccatactattctgctttagtagatcatcataaaattttcctgatgatatcaattgcttgttgtgagaagcctcatcatcaatctctattgcaacacgacgaggtccattttctaaaacaaaatccgcaaatctactattctgataaatatcgaaaaacggatattgagagtagagatacccggccttttctgctccaaaggtatctgcaaacaaatcaataaatagatcctctgcaacacttccggatgcagaatgatatgccggcatagtattcactcctctacaacttctttaagtaagattctcttttcaaagcctccacgcttagcggcctttttggagcgcatgtgttccagatcttcaaccgtataaccacgtgcaacagcacaggcccgaatgacctccagtaaatcagctagctcttccagattctgatcctgatgatactctgcaagctcctcatccagttttttatccagcatttgaagataggcttcgtcagaaagaatctctatgacgcaacttttgccactggcctctattatttcaggaattatatctcgaacaagtttattgtatgttattgtttgcttcaagtaaatacaccctcacatttttcgcatcaagtaaagtaattaaacaatgcataattcataaacaattcgcttaagccatttcttttacaacgttcagcagttttgtaaacccttcccttaccgattccggctcagtttccggaccccagctaatacgaatagagctttcaatttgatctgttggaatacccattgccagaagtacataactaggtgaataggtactagaagtacatgccgaaccatttgaaacaccacagtactttttagtcattatcattaatgcttcagaagaaacaccatgaaagcaaatgctgatggtattacatatacaagtcttaacattaccattgacactatattgaactctggactcatcaagcagcgtacatatgagcttcttaattgtagtcattttgactaaattatcttcattgttcatttctgccagctcacaagctttcccacaaccagcaacaagcgcaaccggtaccgttccaggccgaataccatgctcttgttgtcctccaaacataatggccttgaccggtggtagcttatagtgttttttccttaaaaccagaacacctaccccttgaggtccctgtaatttatgtgcactgaacgaaagcaaattatattgagcgttacgcaattcattaacgagttttccgcagctttgagttgcgtcaacatgaaacaaaacgtttgttttagagagttcgcttccaagttcatatatcggttggatttgtccagtttcattattgacatgcattatgcttaccagcaatgtatcatctcttaccaaagacattatcttattagggctgatacatccagaaggttcaggatcgacaatatctacctcaaatccacgtttcgacatagctttaacagtctcgagaactgccttatgctcgatagaagaggtgattatatgtttctttccactttcgtttgcaaaagcttcgagtccctgtatcgcaatgttattactctctgtggcaccactagtaaaaaaaacttccgaagcatttattcctaaaagcgaagccacttgttttctcgcagtttcaaccacaccccgtgcctgatctccgtattcatgagttctactatcagcgtttccaaagtgatttctatatacatcaatcatgacttccagaaccgccggatcaattggggcagacgcattgtagtctaaatatacactcatccttttttcaccgccaacccaagcaaatcatctacactttttataaagcctgttccgcacaaatgtgaaattcctctctctaagttcaagcgaaagtacttagaaacagtatcatcatctataggtaaccccatctttaggcaccaagctttaacaagtgcttcatatacttcgtagtattcgcctccaaaagtgtaccatgacatttctaaattactgtccgcaataatgtcaatatctgtcgggactgtattttccgaaagtgaatatgtcaaggcccatcgacaaaggatattccaatttttaattccagtttttgccttcaatcgcgaaagttgatctttggcttgctgagataaacgaacctgcttaattatcatctgtctgaaaatatcctttcaaaatagtggtgctcttacttccatcatcataattcagcgtaaactcatctccgactgactgtttcataaggttatagtaatagtgatcaatctcagaatcagtagatagaataattgtttgatcactggcattagggaaatatgttgttaccagtgatgtacgatgcatagaatccaagcgtgacaacggtgtatctattatgaccggaagttttttcttagaacaaatggctagtgcccacaaaatagctattaccattaactgcttttcaccagctgacaaagattctttagatacttcacttccgtggtcatcccaataagtcaaatctagtgtctctgggtgcattgaaattgactgaataagattcttcttgttggctagttttttgtagcattcagtgattgttgccccaagaactcctgtttttcttctttgaagcgcaatagtatactcttcagtaatccgcaatgccatattggaatattttgccagtctttcttcatcatcatacaattctgcattcttcaaaaaactctcgacagccctaccgtgttctgcagtagcagaaataagggcattgtttattgacgaacgttcttgctgaagagatgtgaaatcgacttcatattgtactaattttgcttcttcttcacggagtgtagaaaataagctttcaagtttatttacgttgatatcaagagaaagatagctctcaatctcatccaatttctttcttaatgcagcctttttcattaaaagatctttgacacttactaagctttgctcaagagtattatccagcagtgcattaagttggaacagtgcatgatcagatatctgatagacttgttcggcagcttcttcctgtgttgttttttgaacaaattcgacaaagtctttatttgcagctaaagactctgtgtggtcggcggaatagatttccaaaatattttcaatcatccctatggcctgctgcattatttgatcattatgctcatcctcggcctgaagcttaatctcactaatcaaatcccgtaccatcattagtggaagtcttcctgaagcagaatcaaccaaagcggtttgattttgttctatttcagcaagcaagtcggcacgtttttgcattaattcttgacgctgctcaataacatcgccacctttgacttcgtattgatgatgcagttcgtcaataacagctcgttgttgttcaatacacaattctattttttcaatttgttcagatagcgttgccattgaatcacttaaactttcttttttctggcgcaattcttctatctcaactgtagctgcagcttgtgttccatcttttgaaaggcgtttcaaaactctggaaagatcatttttaagcacatcaagaacactaatacccagcatcgaccggatggagtcttttagctgaacattcgcatcatcgacagctaattctgctattttttctccatcgaagaagaaataacgtgacaacgcgctgggcaaaatattttcaataaacatagcccagttttttgttaaaaaatcgctatattctccattttcataaacaatgatgctttcttcagtacgtttactcaaagcatcccactctcgatgcactatataaacgttttgagaactttcattcattacgaattctagttcgacaaatgcatcttgatggctactattcttattcacaaatgaacgaagatattttccgtaacttttatggttgctttctttaaagactgccgaattagagccgtataaagatagcaaaatagcctctaaaaatgtggtttttccccgtccattcataccacctatcagaacgatggggttactgcacgagaattcgaatgtgcttattcccgcgtaaacgccaaagtttttcattgttagtttcttaataatcattagccttcatcctcaacaacatatccataatcggaatcatctaacggggtataatccaagaatttttcattatattggccgcccatttgtttctttcttatcatccgatcagaatagtatttagttgcatcgctttcgttttgataaaaagttcttgtgattgctgtttgaatatcatcaagaattccttttctatcacctaagccagaggctttattttcaatatctacaagtgaatacatcatctcaaaagtaagttcttcttcgtcaaacatttgagaacaaacatcttttaggatgttccactcgtcttctgaaaaattatcgagatgaacccaatctggatcatcaaaggtttttcctaatacactttcatagattgtcgggactgaatcaacgaactcatgcttttcaaggacccatatccgtcgaatagctcgtaattcttcaattcgaattaattcaagtccctgaaattcttctggtccatcttcattgattcctttttggacttccaataagcgcctcaaccaatgctctcgaacttcttgtttgtacggaccatggaataattggccatagttcccctgaaggtttccgcgcattcgtctaaagcttcgacgatctcgatcaccttcagaatttccaaattcatttctaaattcaagtaacggagtcatccactctttttcaccgtcatttgcaatcatggcctccatcgacttgtcgctttcaaccatcgtgcatacccaacagccaaatctactttttccacaagaggggagatccttatctaccattagtggacattcgttatctgtggttgctcctttatacatcgttagaagttcttgattagaatatccccaggggttcttatattgcattaagaatacccaaacatcatcatttgaccaagattccagcggcgagaaaacgagttcattagccaaagtgggattggggcttaaaagctcacggactcgttttttttcaagatttgtcatagttctattgcgtcgggagctttcctgctttctcgttcctaaaactaaaataatctctccgtgctcggctattttgttttttataaagttatttactggctgaattttcaaacgatccgtacaccaacggtatttcattcttgggaaaggatagcccctacctataagatttacccagaatgtgttattgaaatccggaataagtctctctgggataaaaggaagttgacgcttgttcgcagtagtgcgcattgcatctaatgacttttctacccattttgccacaactggagactctaccagtgtatctgtattcataatatgtattggtttttttcgttgctctacaggtaatgcttcaattgccatccatacaagttgaactgcagcagtgctatctttacctccagagtacccaatcatccaggggatatcgtcggacaaatacagattctgtattgttaaaataagtccttcgatattttctttagttatattttccataaaagattacttcctattccgacaacgtttttttcaatgtgatttcagctgctttttcatcagcagacaaaggtattcctaaatgttctttaataacgtttgcaataagtaatccagctttcttgttggtgataatgcgaccattggcattaattgctcgtaaataccattgggggttagttctatgccaatttacatttctcaactgtgaaagacatgccgacatgcctttttcctgattctgaagaaaataattccccacacgacctagtgcttggattacaatgctttgtgtagcaatataattctctcgcaaatcaacttttgttatttctttatgttctaactccttccactgcatcatattcaaggctatagaatcccaaaaaagaaacaaaaactcttgcacttcagtgcaggtactacgtcctacaatgagtttattagcagtataaaaggtgttcaaggtgaacagactagatgagtattttcccaaaatatccttttctttgtcggtatatgtattaagaaatccaatacggctaataacctctcgagttattaccgccatttgatctctagaatcatataattcagaaatagaatttgaagtttttaccgcatttttgttaaggtccgtaaaaatctgttgacttctcgccaaccccttgtccgcaaaaaaaacaattggaattgtctcatttcctaatgacggatcttctttcaatgcctctagaatagctgattttcgatgttgtccatcattaattaaaaacttggcatctaaatctatttctaaaactccggtgtccgaatttataccagcaggcgtaaagaaaaacttaccatcaattgaagcagcaagtgccgagaacacataagaggtgcgattgtctagtatatatttactgataacaggtattctggtttcatttaattttctttgagctctatactccgggagaacatattcttcttccgaaggaaacaatctagaaagcattctcagtggaaccattgcaatgtagtattctttatcagcttgaattcctcgaaccacagtaaatttatatacatattccatttgatactcctaacataaaagatgagatatactcaagtacctacttaagcatatctcatctatgcgttaaagtcaatctaatgcttctttagttgcaatcaccttgatataaaagaaagctttatttttgattcaagtcctttctttataatccaatttcgaacattaccgtttagatccgcaatagttgcccttccggaagccatctttgtcaagaaaaggactgtttcttgatccatattcaggtcgcaaattaactcttctgcgctatcaacagcctgtttcaggcttgcaagaacagaagtgtcagtagtccaagtttctgcagccttgatttctgctatacaaccgttaattcgttcagaatctataccacttattaccttcagcgtatttgttgtagttgcggtatagtttgaaaaatgttttccccattctctttttgtgataacctgaatatttttgaaatcagtttccgcttttgatactgagtccttatcagcatatccagtactgattgcattttttaggctttccaatagggaaagtacacctggctgaattgttgcagagattgaaaaatcaagattgtcccgtgcatattctaacgcaatagaaaatgtattcacctgtttcactagtgatttatattttgcgtccgtagctaattgctgtgcttgatttgctttgattaattccaagcggcgcagatttttcatgtctttaatcttgcgatcgataatatcaaaaatcattcatgcacctcctcacaaaaaatccctaagcaagtatttatagcagcaatatcatccgagtaacgggtttcgacagattcagattcttcaacatctccgagactgttttttcttgtcactatttgtttgtctattttctcaaagtcagaatcaagctgcttgagcaattccatcagaggttgcaaatccgaaagaggatcactagagaatgtcaaaaaaattgtcagcggatcatcttcatccaacacctctccaatatcattgattgccttggcgatcgacgttgcggttttctttacaggatctgcagaataatatgcaacagagaacatatccgtgttaatttcatcataaaaagatttgactttacctgctagttctcgaatatcatcctcatcaatttcatctgtcccaaagtaatcatagattttttcaattgtagaccgagtatttgccacttccgcttttgcaacattctcaattcgatcgataatatctttcaaataaacaaatacatctcggcgcggcttcacagagtcctgaacttccagagcctcctctgggatagataatttactcgtttttacttttctgaacaaacgcattaagttaggctcgtccaaaactataattgagccaccaccgccttggggaatattgaaatactgtcttactgtttcacgattggatgtatcagcacctttttgagataggagcgaaacaagagaattccattctcttgaatgatttgtttttgcgtttttttgcggtttggcttcaaaaagatactttgacgtcaagtttttcaagcttcgttctctatactctccgcaaagaatcattctatacatttctgcagcaatagccgcttcaatgtaactagtgtttgaaaccgacaattcattaactgctgcgaccagactatccttaattcgtgatgcccatgatgtaactaagtaggcatccaagtctgaatccgggtaattccaactttgtgatccatactctcgccaccgaataaacgcactgataacattcaaggaatcccaatttgctggcatgatataaaaaccagcagttcgaagcttcgattggttttcaaatgttaccaacctgacactggaattcttaaccttggtaatgttatcactcgaaatgccttctgcctgccaatttatagcagacaacaaaaaatcacacatgtcaccctgagcagcgcgcaatatgccgcctgtgccaacattagcagaaatatcaataatgtttccattagtccacttggttaactcagcgtttgctttgttcactctttcttggacttttactgaaatgactggcgatacagatgaaggatcaggggaggttatcggatcaggatcaggactaggtctaggcggcataggcggctgtgctgaagacaaactgatctctggcatacccagctcaacaagaatatcttttcgtactgcagatagatacaaaacgccatcccgaaagtattgatcgggagtgccatcaccccaaatgcttaagaagcgaaatagacgatctgcctgttgttcctcattaatctgattatgaatgcggtaactgagggttgtattaacattaacaagattaaatttgatgcttggaaatttgcttttgtcgttcaatatatctgttacaaccggttcgataatatctcgaataatgtatctcggagtctgatgtccttttgtcaatccgtattgataaagatatcgaatactattttttgtaaatggataaagacataactttttcccatattcgattgtaacagtctcccagttttttccctctttaatctcatgtaccggatattctgtactagccgcatgattattaatccacgaatcaattgtggattccgaaagggacatggcattgacatatcgcccaacaaactcaaaaataccatcttcgtcaaaaacatcactcggaatataaacatactgagtaattctatccttgtgattgtctctgaaattgttctgcaggtagttactagtagtaccaacaatggaagaaatacgacaaagattctcgtttgcattcattccggtatgctcgacaatgagcgcatccagcaaagcatcgtcaacaccagtaaaagaggtgacatcctcaatgaacaatgttagattcttgccaattctataaagttctcttcgaatatcttgaaaaatgtctctaaaatctccaggttcaatacccgcacaacgttgaataacatcattaacaaactgattaagatagttggcaattttcattgcatcttctagcccactatcatccgccatcagttctctagccattttttctgctttagggtctgcaccggctctatgaatgtcttcaaacaaatccgcagatacaacaaagtcttctgcagtaaattgggcgatcgtatctctgtcaacagatgaattttctgcgactttggaatagatacgctcaatcggaccgtttgcagacatcagatagttttgaacaacttcgttgtacaaaaaagctgtcaatcttttacgcttaacatttgtaagatggatctcgtggctttcatcatcatattcaatttcattgataaaatcgtggtagattcttcctttaagcttattctcatcctcataaacggtagcacgaactaatctgtcgtaaatctctttattcgcaatatccttaacttccggagtggccaataattgtctaatggttccctttagtgtattatcacttctgcgaataaaaaggaccacttcattttggggcttatcatagcgatatcgtgcctcgaaccagcgaatcaaatgagacttgccagtgccactttgtccatacaccgcaataaattgatgtcgattatcaggatttagaatgaagcgtttataaactttttcttctgaataggtctttccgccagatggcataatatcaaatttgttcagaagatgaattctttttattgcaacatgtgtcgctaaaaagtctccctgagaggccgttatcgaatctgtttttactacataggagattcgttctctcgctatacttgaatccattttgtgacctcctatttgcaaatagtaatattagttatggtaccacttatcacatgcgcttttaagggatataagttccatatatcttcttggtcaagaatatgttctaatttgatgatccctacatcgtgaagtgtacgtagaccgttagaaacaccataattcagctgtctgttagcgggagctgtatcaataataattttactaaacggcagaattcttgaaacaaactctccaaaggaatatctgcgacctttctcaaatccagcattattaatagtgtcatgaagaaaggtgtcagcatttggaatcataaacatattttgcatatatccaaagccaagaaaagaaacccaaaaacgccacgcacgcatggccatagcgtctaccgaacgatttatcttttggccgatcatcggtgcaagtgttgctacatttttctctcccgataatgtgttagcatccaactcgaaataagctcgagtcacttgataaaactgcccagcatgaaattcttcaataattccatttacatactgtcgcatgcttgctgtcgtcttaaccaccgaagggtcaactgccagtgaaaccatattgtctgaaatgcttatgagctttaactcctcagccgcatttttataatccgaaaaataagaagaggattgattcaaaaaatctggttccattttctccttaagctctgattgagagataggtcgcttctcaacaatcttgcataacgcgtatactcgctctggtatggcaggagtaaccattttatcattaaacatttttacctccttatgaaatcagtgcattggatggtaataccggtccatctacaaggtcagaaaaagctttattaagccaatcaaaatatacgttttcttctaagacgtgaatcagacgaatgcctggatttttctccaaattacctaaaacatatctcatcaaatcatatatttcgcgcggtgttccgttgtactgtatggcaattacgcccgaaagatagtagtaattatgtttttttaacaacgccctaagatcttttggattgatcaccaatgtatttccgattgttgacatattacatataattgcatcagtcttatcacttgaacctgaagcaattaatgccgataacctatattggctaagggacttaaaaagtgattccatctcttctggagcaggaattgtaataatattctgagatccggcaaacaatgaaagttgatcctttgctagcactttggccggcttatcgacacttgtttttaatggataatctataaagtcactttcgtttgcatcggaatgtgcattgcaccctgcacagaattctgaaaccttatcatatgtttcaaaaaacatttccgaccagcaactattatcgctattatagattgcattacgcatggttctaaacgaatcgacatagtactcccattccatagcccgatatttttcaattacttcaacttgagacatatcattaacgcggagtttgtcggaaagaatttcaaccacaaacacatattttcccgcttgagacagaacctcatatatcttcagcagaccataacgccgcaggaagagaatgacatagatattccagttcatatcagcatctgaagtaggcgaatcgtcaataatgtcaacagatacataatttggtttgactgaggaatctatgtagtttaagcttccaatccgcggagaatacgggcttgaatacatgctgttccagcggccaactattttttctgccgtcattactctttttgaaatgcgcccaaaagaaatatttaagtcgtctgggtaggtacacataatgctaaaacaaggcaagtgatcacggcctccacgtcctagttcttgataatatgcatttgcgttttgcggaatgtacatgtgtagcacagtcctaacatccgccttgtccacaccaacaccaaatgcagaagtagcaaccattatttcaaattgatcatcagcccaagcttctattaactcttttcttcttgttccagtagttaatccggtaaaagctttaacattgcgaatacccgcattacccaacacggttacaatctcatttgcatcatctggacgtgccacataaattatcataggatgcggcatttttcgaacgagttctaccattttatgctgtttgtcagtgtatgattttgcctttacaagagaaaatcttggttcatgccttaatgaatcacaacgaatttcaatccagttctgcccatctttcgaaaagaagtccttaagtattgatatacagcgcggctcgaaagttgcagataataatatggttctaatgttcgggttgcttaacagcaacttatttctccatgattctagacattgatagtcaattctaaaggatgctccccaatccacaacaatatgagcttcgtcaattattatatttttcagataacgtgacgcattggcatccttaataacatcaaaaaatccagaattattgattaatgtttccggtgagataaaaagcatttttgctgttctattttttatcgcctgtaatatgggtcctgcatccacaccactgctgtaagaaaaaacttcattatccacatcgtcggttttgattatggcctttgctgcacggacctgatctattgccagagaaactgtgggaacaattactatggtcaagcctgtttcttggtaagaaagaatttgcgtgattaggctttttccaccacctgttggcaatgataccagtgtagtgtagccgtctggagtgttgagcgctccatagacagcaagcttctgggcagatgacttaaaacttttaaatcctgtaatcttttggattaaagaatctgtgtgaaggtcgtacccattacttttggggttatgagaggaatagttggatagaaacacttcctcacagaatttccgtttcacgtattccggacactgatatgttgcaaaatacttcatatcttgtgagtcctgaacaataccatacggattattttcttctatatgtataccatttaggctaatttttgcctggaatgttaaaaggaaatctctcaatgtgagcagaaaatcgtctctataaacagtattatttttgaacaaatcaaatgcacgacaaaaccgttttgctgtgcgcagcaggaactgatcgtacgaatttgtaacgttttcaaaatcgcgcacagatgttccggcattattaatatattgttcaacccataaaatcaattcctgcttgtccatttgcttatttcaccatccaaataaaggctgcggagtcgagtgttattgtaggacgacgaatcgcctccaacaacacatcttgttccttttttattgcatctattttgtcgtcaccgacaccgtagaattcactattcgcaactctggcggaaagggctcgttccatctcttctcgagcgcctctaatatttgatctacgcttaaattgttctaatgccctttgatatgcttcttttctagcagttcctacaagctcagaccaagcttcttcttgaaacacttgcttaaaccaagaaatatttgagcttcctgtaatcgcttcttttaaaaaccccgtgtcgcgacttctctttccaagatgaatagtcttacacttgctaaatccactattaatgattcttacatactctctttctatcgtctcggctgaaattgaatcagggttttcaattgaaaaggcaactactacttgccctgacattaaataatttctgtatggtcccaatgcatatgtcgaaactccatgatcaagcaaatatgcttcatttggcgtcattgtccaagtgaaaactaatcctttccagttaatggttgaggaaatcgcaaatgcactggaacgtcctttacacgaatttatagcattgtttacaatgcaatcaaacacctcatcgcccggggcaaaaaaatgtagataatcgttctcgattgcctgctttcgagtaaatgtacctttaattgatcgaccttgtccttttatagctttgcttcgattgtacgcatcttcaacacgattaacaaatttgttttgctcagaattcaaataatcattccagtgtggtggaattaattgagaattgatggccgatttaggggagaaggatgccgctgtatatgtaacaattccagttttacccccaaaacctttgaaaccagcaaggctagcccaatttgtcattgtatttgcaaatagtgcattttcgttttgagcatagtagtcaattaatcgtttcaactctgtatacattggtcggaacataaaaccggcagcgtcgtaattttgctctttacgaacagtttcccgcatagactctgccaaatcgataattttaggaatacgttcaaacaaaccatacttgaagtcttcttcaactgcagcaatgatctgctcgttaatatccttcatgatgatttccattccacttaatgactgattaaaaatctttagtcctgtgttccagaagccaaccaaagcgtcttcgaaagaatcctctgtatgaataacaaccgatgttacaacaggccgagctgggtcacgttctagacgatccaatctaccgatacgttgttctatcatgtttgcgtcccacggtaaatcaatgtggattatataatctgcacattggaaattgcgtccttcaccacctgaataatcacacagcattatacgacaggtcgattcattctggaaccgatatgcatttagctcaatgtcatccgtggccatatccacgccgaaaaagctgatttcttctggcataaatactttctcaagagcatttcggtaaactgagaatgtctctgtgtagttagtaaagagaactattttttggtcaaacaactcatcacagagcaaattgaatacagaaatcaatcttgagcaatactcagtctcatatgtgtccggatcatccaatatgtcagtaataattgaaagactatgattctcagctttttcccatttttcagcattgctaataagatctgtctctacttttatccccgcatgaaccagtttgctcaattgagcacggaatgcccatggagaactaaagaagcttcctaaaacaggacgaacaacagagtcaacatcaatgcgagacattccttttgttagccagtcagtgattaattcatagcatactgcctcataggtgtttttatctttatcgaggagataggagacctcttttagttctcgaacaggcagaagccgggatccgtcttcgcttgtttctaatatctttcgccgattgcgtataatgttactttctacttggtaattcccgcagatataggatattacaactttgatttgatatacacccaaatcatccgcatcaaaatttattgattcaagaagacttgaaagcttgctatcatttagttcttcacaaatctcttctaaatcttctcgtatctcttcgaacaactcttcacagtcttcggattcgtgaggatcttctcctgaatctgtagcagaaccaatttcttcttcaaaatcctctagatcatcaaggattaaagctgttttctgaataatgcggccctgttttccaaccaattcgctaaatctttcaatgttaaaagaatcatatttcataggttgaagaagtctcaataggtcaagatactcctctttcctctgttgaaccggtgttgcacttaataatagaatgttctttgatttttgactaatgctgtgaagcaatccgtaatatgccttgttagctaggtgtctatgaacctcatcaacaatgacaaaatcccaatctagaatatcccgttccatcaaatcagaaataggttttactttgacacaatttccatttttaccggctccatctgaaatattgaacttcagcaataattcagttttccattgctctttcaacatatccggaacaattattagtgctttgttattagccctgctttgtagatatattttcaaaacagaaatcgcttcaaccgtttttcccatacctacttcatctgcaagcatatagcgacatggtgattcctgcaggcaacgcattattgtattaacctgatgggacagaagataaatctttgatcctgccaattctttaaacccataaatagaattttcaagaatattcatgcttcgcgatacaacggaatggccaaaataccaacatggattttgaaattcatattttcgaagctgaactgtaggatcaacttttccattggtaaaagatgtaactatttctttttccgatacacgaaatacagacttatctttatctctttgaacataataaaaaaatgattcgtcttttgatttctgttcagatagaattttgcatagttcaccctttacgacaacatctgttcctacaaacaagctacaatgatccaccgagctaataggtacttcaattaaaccttttggcatatcttcaaaaaacagaaggaaatgaaaaggatcatgtattctgacagtaacagttttcttaaaatcatctatttttgcaatctgaccgcagacaaatactcgcgggtgggttacactttcgatatctgcaggacaccgaacatacattttttcacttaacatatgttaccccttcaaatctcggatcttgtgtaatacgcagcgcagatttccctgttggaacaatactggcaccacaaatcaacatccttccgatattggatctttttcaaagcggtttcagaaagctcttcttcaatcttttggtcagaaacagcagaaaacttatcctgtaatatgtcttttcggaaggtttttggatcagatagttgtttgtgaataaacaattctctgatcatcatgtactgtctttcttcacttgataatatcgaaaaactctttgccttactgttgagtattctatgccgaatattgttgattacatccatcctgttcacgttcagcacaaacgggaaatactttttcagttcatcaaaggcgtcatttaaccgctcaataacaatagtttcgctaattggtaatccttgtaattcctcttttatttggttctcaagcaatacctctaagtatttagtaagtataaaaggatctttatagactgtatttttttcaataacagactctaacaagaatttatacttgcaaattctatatcggaaatagtcaaattcgctatacttttgaacagacgcatttgcagtctcaatcgaagatacagcttcggaaaattgtcccatacgagtttctacatacggcaccttttttacgccaagtattttcaaaaggtagtatggatccctttccttatccccatctcttttcacaaagctcaatttgaactgtgctctattgaattccaagccaaagagtaatgcgtaccttttgaaatgcttgtattctttgcgtgctttaacataaacctgatatttccaatctacaggctcttgagcaatttcaaaaaaagaatctgttaaaggccacgggaaagtagcgcgtttcactgcgtcgatatcttcgtcagacaaacacgcaaagtgatatattatcggttttccattcactttttcgttgaggctgcacaaaatatcaccatcgatttgttcaaaattacgaacaatccaattagcactctttccaggttttgtctcttggacaagatatactgacattgttgctttaaggcattcaaatgatgctgaagcatcgatattttcaacctcttctaagcgttcgagtacacggcgaataatatcagaaaattcttctcccaaatcatgagagtccaaaacatcttgttggagatagtttttcaaccgcttatagaactctctaaaattatgtgattgattttcaaagtcctcgtaaaagtatgtcgcaagctcatctaaatccaccaacgcatgttccaacatctcgatttcttctttactaaggttataatacgagatgtggcttatatattctttcttggtaggatcggtaagatgttttttcgccttgcgaagtttttttaaccgcgaagtcatttcgtcaattgacgtacatccttcaaacaacgacgccgatttcccccatattgaagaaagctggcccaaagattcttctcttaatattccagcttctaaacattccttgacatcattaatatctgttataaggatttcattgttaacagcatcccacatattagcgattgcgaggaaaaagtgacccagtggataatccaaaaactgacgttcgccaaattgctccggaaaataaatttttaagatatcatttgccgaactatctgccgcatatatctgttctttcatcattctcattggattggacggatcaactttgcaagcagcctcaaaaacacttgcaacataactagcgaactctgtcatgttatcgaattctgtaatctcatacgaattagaaagtgttagagcatctacctttccacaaatcagttttccaagattatccgccaacacatttcccgtatagctgacaggaagatttaagctcgggctaaactcgacgcctccaaaatctgtaatcggacaatcaaacgcagtataaatatctatccaagtctgatatgcattctggtattgaggttggtaattaaaaagcaggattacctttttatatgctgcaatttcttcaatagcacgaagcatgattggcgagaattgatggaccccgtgaatgacaaccaagtccatggtaatcgcatccaggtccaactcctggtgagttgctcctttcattgcattacaaacagcctcattgatttgaacttcatcaaatttagagttgataacaaaatttttcttcttttccgaagacagaattcgcttatatagctcgagaataaattcctgctccgaggtgagtttttcaaccaggacatcgttcacattgatatttaattcaaacattactcgaatgcttttaaatacttcttcacgattaaacagaaaagctctagttatgttttcttgttttgttgatcccagcacagtggggagaccgttggcaattatgttatcgatatctgtatgttgttttataatacaagatgtgctctcccaatgatcgaatagtacctgagtaagattctgtacagtcgtaactcgaccttgaacaaaatcctttttatacaagtacttcaacccattgaccagcgtctgtgacacacagaaatatgggcactttttgatctcatcccaatatggttcgctatctaatttgtatgggtctctatatgtatagattgtgattgacatcttattcctccatcaaagaaccccaacttacaactggatgactgtctaagttataaatccaaacacaattccgaattgcacgtgtcaatgcaacataaagaattctggattcttcagcaatttgttcatttacttccatgttctcatcatagttggaattccgttcacgaactttgttttcaaacaaaaccgtataggataacttttcgctggaatagtttgcgtcaagttttattttctttaggtcacttatatcatcatctgtatagggcaagattaccgttccgtattctaaacctttcgacttgtggatcgtagtgcacattaactggatatcgtcattgtccacttcgatttctcgagagagttgctgctgacctgttagaatattgattcttaaatactcaacaatttggttgagagtgagcgtatcaacacgtgagtatttaatgattctctccatcaaatactcgtaattagccatatagtacctctggtctgccgaattgaaactatattgtttccaaggttgcaatgcatcatagagatgtttaaggacgaaaagaataggttgtgtataagcttcatttatcacttgctgccaagacatgttcattcgaaccgcaaaaaaatcatctaagactctttttatgtcatcgataacctcagaatcattcatgttgtgataattctgatagttcaacttcattccagtgtaatttgattctataaaattgaccaaatatactggttttgaagaattgtttagtgcaagcacgagcttatacaaatcgatagttgattccagatggaaaagatctcccccggattttgtatcgattcgtattcctttctttttccccgcgttaacaagattatccatttgccaattatttcttactaaaacagcaatagtgcgttcttctttgctaagcggactttgatgagcttcagctctttttttcataatggatttaataagcgctttttgtttcagcagtgtatcaagaaaaacctcgtagcgtttttcctcatcttttgcatgacaaggaatgcatacatataaatcccgatcatcaacatcagttattacaaagcttgttaattgatcgataccatttttatatggcagatagtcctgagttcccattgaagagaagatatcatcaaaatgatctaataagcgatgatctgttcgatagtttattgtgaggtggtatttactccactcatatagactgtccttcgccacctgtgaaaaagcgcttaaccgggctcctctaaagcgataaatactctgcttcaggtctccaacaacaaagagtctgcattctgcatttattagcttttgcaatttctgaaacacctgaatttgcacgtcatccgtgtcctgaaattcatcaacaaacaaatatcttatttttagggaatccaatttctcaggtaattgtttcagaaccttttccaaaagaatgatacattctttcaaatcaatatcatttgcaaggtgagtctcttgcgcatattgttcctcagcaggaataacgactttttctatcaattcattgaaatacggaactgtaccatctaccgttacgcccatatcagaagattttatttgttttaagtcaatactttttacaagtaaacgatctgcaatcatcattgctttcttttttaggtcataaatcggaacaggaacttcgttgatgaaattaggattttcgtcctccatattggcaagaaactcactcagatgcacatcatatagtttccctctaaggtactcgcccgaagatatgcgaaaatttgtaccaagtcctaaatacagaacttcgccgcgcaagatgtccaaagcaaaactatgaatagtcgaaatatgagacctatcaacgtcttcgataaatttcaaataacgagcattgcccgtcaagacaaagtaattgataaacatctgctttaggcgaactttcatgttattggcagcatcgttagtaaatgttaccattgcaacttcgtcagcaatatttgccacggcattgttttttttgttgcacaaataagcaatacgagaaaccatcgaaaacgtttttccggttcccgctccagcttcaactaacgtatttttgtggacgtctgcatgttcaaccaaatactgctgaaaattaaagatagttacatcggatattttttctatgaccgcggcttctgtttgattgaaacatccttcctctacaacaatagaactcgtggttatatcagataaattgctaacacagtaaacctcaacattgaatgaacgaaatacgtttatgccttgtgcgagtccgttcttgaatccaataccaagcttatttatacttggctgaatgttgtgatgagaatatccctcattaagagcatgagtgataatgtcaaatgttgtctgatctcctacgaatgcaattcttttaatgccggagaagtagtcgtctacgatttgctttatttcagacgcagttaaaggatttggatgtacagacagcaacgaatatggccgtgtaacggtttcatcagcgtgtttattattactatactctggctcccaatcttgtctcagttttgacatcaaatccatagaaaaggaagcatgtggtattccttttgaagaatcataggcgctatatattttctttactaataagtcttgattttcaagatcttccttgaaaatagtaaactgttcttccgatacaatatccaagtgtgaagacaagtattccgctttgctaataaacggatagcaaaccatgtcgaatactagcggacttatattgtatttgtctgtaattctattgagaaatgcaaatctatatgcacgtgcttgttttttgggtgagcgctgcgccttttcatacccttcaacaacaatattgtcaacgcccaagacattgattttattgcttatccaaccttttacttcaataataagaactccaatattttcaataaagaggcaatagtcaaattcgcgcccatttatttccctgttgttatacacaacgacattattgggaagagatgagcctaaagaatcccaaacctttgcctcaccatgatatgaaggtctctgatcaatcatcttggccataattattctcctgacataatgtaataactatgattatttagacacctgagctttggcttttcctgtaatgtatttgccgcttctaattctcttatctttcggcttctctacatcagctggtatcacccacatgttaccgactctcattattcctttaatacggccttcggtacacaaaacctgaactctacgtcgtgaaatatcccatttttcagctatctgcctgacagataagtattccatatttttctcctgttctcgccagaaaaatctacaataatacaaaatatattataggcacaattgcgaataaagtcaatgaagatatgtcgtttgcagcccacaggtcgaatttttcttttgcgattaaccccaagttggcgattttatctccacgtaggtatggtagaaggacttcactgtagtttagagcaagtttcgccttgtatgacaataatccattttcatggtcattacatccagacacttgttggggatttcggttccccaagccctcgcagaggttccatcgctctgctctgtcacagtctttgaagtcttcgactatcaaagggggtataaatatgtcaggaaagaaaaaacacttgccccctgctaaggaacaccgaattaatctgcacattacggaggacctgtaccaagtgcttcagaccgaggctgccgcttctaatctcacgctttcaaactacatccggaagcttctcaccagcaggcgtcccacggtccatcgaaccacataaatcgtctacgataatccggaacttttgcaggtgtttcggttccttgcaacatacagaaacaacctgaaccagattgcatcgtgcttgaaccaaggaggctcgatgactaactccatgtgaaaagaaataaaaagctgcatagagatgaccttacacattactttttttcttctcgtttttcttcttgattcttttttatcgtcagccagctctccagtagctgaataatggtatcctgcatttgctgctgtgtgtatgttgttgggaagtaccgtgaaaccagattcatgggaagcgctaggttccagcattctgttttcttcttttcgaacaagatggccagaaccttctcgtcagaaagactgccttccttcgatagctttcttatgcactgtgcctgggaaagggaagggctgttttgttcactttcaattgtcaggaagaccagcacctgttccttcggtgtcaaataggacagttctaccgcaggcgttacggcaacccgtccggcatctaccatctccagaagctctgggatcagttcgttgagacggatatatctctgaatctgcgtagagctgtccagactattctttgcaattaaatctctggataattttcgattcgacttctgtccagcttgaagttgttgacaaagtccctttttaaaaaaatagcatatctgaaactcttgaaaatagtaactttatacgtcaaaatttcaaaaatagggggttgtcaacagctcgatcttaggcaaaagttaaatcatttcccgcgccttgccgtttcaccgcgtccagcttcatcttgtaagccctggctcgttcactggaaagaagagcctctctctgaaaattgctgtctaccatcataattgttgcttcgtccccatcaatcacctttacaactgctggaatttcttcgatcctaagtttttcgcaagtatattgtctgcgatgccctgagattagctgccatgtaatcccgtccatacaccgcacgataaccgggtgtagaacgctcaacagccgaatgctgtctgtcagctgcatcatcgattcctcatcgataatgcgaaacggatggtttgggaaggctcacagggagcccagtgggatcaacacgattttttcttctgtttgcttcatttcaaacctccttctgagcgcaaaaaaagcgcccaactattttttagatagctggacgctttggtataactgatgattaacgatatcaaactgtgtcaaattccgccaaacaagagatgcctccgaggtgcctctgatagaccgtttcatgggaataacgcacgagactaaatcagtgctgtagggtagtttttaagttccttagttagcccattttttaacccataaactcaaattaacccatttttaacccctataaaatgggttaaacaggatcactgtgttaaacgctcatcagctctgggaaaaaggaaaaaccccgaaaatcttgagtttacggggttttttaagactattgtcgttcgaaaagcgaaaattatctcttgctgaactgtggtgccctacgtgctgctttgagaccgtattttttacgttctttcatacgtgggtcacgtgtcagatatccggatttcttaagtaccggtctgtaatctgcgtctgcctgcagaagtgctcttgcgatgccgtggcggatcgctcctgcctgtcctgtgtaaccgccgccttttacattgacgataacatcgaatttgccgtctgtctcagttgcaactaatggctggcgtacgataacctttaatgtctcaagaccaaggtattcgtcgatgcttcttttatttatagtaatgttgcctgttccaggtactaaatatactcttgcgatagatttttttcttcttcctgttccatagaattttgcgttagccactttctatatcctcctttcaaacctttccttaaaatttcagctcttctggtttctgagcctgctgctcatgctcaggtccagcatatacatgaagctttttgatcattgctcttcctaaaggtccttttggaagcattccctttacagcaagttcaatcactttttccggtttcttatccatcatctctgctaatgtagtctctttgaaacctcctacataatcagagtgattataatacatcttctgctccatcttcttgcctgtcactttgatgtcttttgcgtttactacgattacataatcacctgtgtcgatgtgcggtgtgaattccggtttgttctttcctcttaaaactttagctacttctgatgctaaacgtcctaatgtatatcccgcagcgtcaactacataccattttctttcaatcttgtctggactggccatataagtcttcattggttaacctcctgtgataattacattccattaaaattattattatattcagaagtcagtctgttccggggctttggctcaaactgattcatctcatgtcatactgctttattatattatacgcacccacgtgtgtcaaccattttttgacctttttataccataatctgccggttttaactcttcttccggttaaaatagaatccgtcaatgatgcagttcataatttccaaggtcatacacattggtgacctgcccaacccgcttcacctgcgccatctttgtctccgatatgctgtagtacatatgatcatcgtcaaatataagcctgtggccgcagtatccgagaatcggcacttcaccgcgcagtgtgccttcgttatcgtaatagtatataaaatcaagcgccgtactgtcgtttccgagcacgatgtacaggccgtcctccagttcagaatattttatgttttatttccatataatgtccgctttcctgcgcggcgcggttcttttgtacgatacggccggatatccgagcagcatacagcacgatatctttttttctcccgtctgaagccagtcccgcagagcctggctcgcgccgatcacccgcatcatgtagccgctgtacagtgcgccgaggccttccgccacagccatattttcgatatttgccgctgcaagaccgccgtccagcggattgtcggacgcgatcacgagaaatgcaggcgtgttaaaaaagaaggtgtcatcctccggactgcgcttccattttaaatagaaatactcaaatgttctggcatattcaggcgcgctttccctgaggctctccactatggacggtatctctttccagacaagctctttgaattcatccagcctgtcctggataaacacatatgtacaggcctggcggtttcttgcggtcgctgtgtaacggcctgcgttcaggatgcgttctgcagtctcccgcccgattttctccggtgtatagctgcggatgctccttctgaattttaccgcgcgcagatagtggtctgcatcaagtgtaaatttgtccttttcatacgcttctacttctgccatgtcgtattccggaattgccgctgcatttaccggacagacggcgacacagtgtccgcagtgcaggcagtctttgaacacttctgccttcccttctcttatcttgatagcgtctgccgggcagtccctcttgcaggcaccacatccaatacatttttccttgtcgatctgaatcatctgtcatcaacctcctgtaatatttatacattttctactgtttctttacacattttcgcatgttggccttcctttttcccggaaatttatgttataatatcttaccttgggggtatttggaaatgagaaaaaatgttgatttattaaacgggcctgtcctgtcgtcgctcacccggctggccctgccgatcatggcaacctctctcgtgcagatggcatacaatctgacggatatgatatggatcggccgcatcggaagcaacgctgtggcggcagtgggcgccgcgggtatgtatatgtggctctccaacggccttgcaacactggcgaagatgggcggccaggtaaatgtcggccacgcgcttggagccggccagacttcggacgcttcgcgctacgccgccaatgcgttccagctcacggctttctgcggtattatatacgggcttgtctgcgtgctgctgaacggacctctgatcggtttcttccggctgaacagtccgcatgtgatcgcggacgccaaaatatatttacagattacgtgcggttttgttatattttcttttttgaaccagacatttaccggcatactgaccgccgtcggcaacagccgttcttcttttctggcgacttcagccggactggtcatcaatatcgtgctcgatccggtccttatattcggtctcggccctttcccggagcttggagtcatgggcgcggccatcgccaccgtagtcgcacagtgtatcgtgacaatgatgttcttttactttgcgtcaaaggacacacaggtgttccgcagcataaagatcacagaaaagcctgacagaaaatatatgatgcccataattaagatcgggcttcctacttctatacagagtattatcttcacaggcatgtctatgatcatcgcccggcttgtggccggatacggcgatgcggccatcgcggtccagaaggtcggttcccagatcgagtccatctcctggatgaccgccgacggctttgctgccgcggtcaactctttcgtggcacagaatcacggagcagggaacagaagccgcatcaaaaagggctatacatccgccatgggtgtggtacttgtgtggggtgtcatatgtacgctgctgctcatcctgtgcccggcgccgatatttaacatctttatctcagaacctgacgtgctgccgcttggggtggactatcttatgatcctcggggtgtcccagctgttcatgagtgtggagatcacgactgccggagcgtttgccggctttggccgtacagttccgccgtctgtcgtgggcatcgtactgactgcagcgcggattccctttgccatgctgctgacacagacagcgctcggactgaacggaatctggtggagcataactatctccagcattttcaaaggaatcatccttcttatctggttcctcctattcttaaaacgaagaggggcagacccctcttagaaaagacaggcctccggcggggtctgccttttttattgggccgtgcccttatgattgccccaataatacaccattacttcagaatcacatccattgtgatactgcggacatgtgatacacttcgtctcaaacggcgcctcttctcttggcacgaccgtaaacccaaacttcctgtaaaaatccggcactttcgcggtgagccatattctctctgcctgccgtcttccggcctcatccataaccgcaccgacgagccgcttaccgaatccctttccccggaattcctcctccacagctacacagcggaggatatactctcctttgtcatacacgatgcccgccgcaccgatccttctgccggcagcttcatctatgagctcaaagcatgtgagcagtccttccggttccggttcatccggactgatctcaagacccgcgcgcacaaacagatcaacaagtgaagcataatccatcgtataaatcaatttctcagacatctcttttgtccctctctttccgatcatctccttcggcagccagccgacacggtgtatatactaaaatatagtacagcctccgggcttttacaatagttttacctccttttttccaacccttatctgtgttatactgattctggcgccggtcttcaatgcacataaatgattccaaagactggtgccgcagacagtatgaaaagaaagcaggtataatatatgtgggcttataacagtgtattttatcagatctacccgatcggtttctgcggggctccggtccataatgacggactttgtgtgccgcgcatacaaaagataaaagattgggcggattatctggaggaactcggcttggattccatcatcctgaatccgatatttgagtcagacagccacggctatgacacgagagactatacaaaggtagactgccgcctcggtacgaacgacgacttcaaagaggtgtgcggcgcactgcattcacacgggataaagatcattctggacggggtgttcaaccatgtcggacgtggattctgggcgtttaaagatgttcaggaaaagaagttggattctccttacaaagactggtttcatatcaactttgacggcaacagcggctacgatgacggcttctggtacgaaggctgggaaggacattttgagcttgtgaaactgaaccttcagaaccccgctgtaacggactatctgctggactgcatccggggctggatcaatgagttcggcatcgacgggctgcgccttgatgtggcgtacagcctggatcataattttatgagaaggctccggtcctttacatcggaactcaagccgggattcaccctcataggggaggtattgttcggcgactacaatctgatcgtcaatgacgagatgcttcacagctgtacgaactatgaatgctacaaggggatcttctccagtttcaactccatgaacatgtttgagatcgcacattccctgcaccggcaatacggctctgaccagtggtgcctgtaccggggcaaacacctcatcacatttgtagataaccacgacgtggagaggatcgccagcattctcacagacaagaaccaccttccgctggcatacggactgctgcttggaatgccagggattccatgtatctattacggaagcgagtggggagaaccgggagaaaagcgcccggacaatgattatgccctgagaccatgctttgaggcgccaaagccgaatgagctgaccgaatacatcaaaaaaatgatccggatccgccagaacagcgaagctctgtgtaatggagattataagaacgtcgtgatccagaaccaccagctcatcttcgagcgctgttttggaggggaacgcgtgctcgttgccataaacgctgcagaccagccttatacggctgcccacggcagttttgaaggcagtgccgaggagcttttgtccggtaaggaggtaacgctgggtggacagatagatctgccgccttacagcgtccaatattttaaaatggtgccgtaaagatttttattatcctgcacctgcttcgccggtatggtgaattcttcgccgtaccggcagtatccctctgttctgaaaggcagagaaagccatcaaaaaaggatgtggatccaaattaattcagttagatccacatccttctttgcttatttaacgagcacctttgttatctccgcaatatacatcgtatgataatccgcctcgggataccattttgtatcgcactccgtctctgtgaagcattcgggatacatttcctgataatacagtttcctgcacacgaagatcatctctgcttcttccactgccgcagtaccgtcgacgtaatacggatgaaggcctgcttctttccacttgtcctccacatcgcggccggacacggaaccgcatacgttcagcgccttgcgctgcgtctcaggcagaaaagatatggtaaaggtatcattcatatctaccaattccttcgtatatctctgggggcggatatatgccgtaacgaccggtctgccccacatgatgccgacacctccccagcttgctgtcatcgtgtttgacttaagttcgtcgcctgccgtgatgagcatccactgcttcgatatcttttcaaatggattgaagctcagttcctcaattgctttttctttaaatgccattgtccactcctccttcttgcggctgtccgccgttacgtttattttaacacaactttgcggaaatttttcttaccttttttcaagatcatgccttctcccgcaaatgcgtctgaagggaaggtctcctggatgtctgtgaccttctccccgtccacagctacgccgccctgctgcacagcgcgtcttgcctctgacttggacggtacgaggccgctctttaacagaagtgtaaggatatcgatgcgcccgtcctccagatcgtcatctgtgatctctgcggtaggcatctgtgcggcagcgccctggctgaacagcgcacgcgcggactcctgcgccttcctggcctcctcttccccgtgaaccagcttcgtcagctcataggcaagaatctccttcgccgtattgagctgagctccttcccagccgtccattttgtcgatctcctccagcggaaggaaggtcagcatgcggatacatttcagcacgtccgtatcgcctacatttctccagtactggtagaaatcgaacggtgacgtcttttccgggtcgagccagaccgcgccattctgcgtcttgcccatcttcttgccctcagaattcagaagcagcgtgatcgtcatggcgcacgcgttctttccgagcttgcggcggataagctctgtgccgccgagcatgttggcccactggtcgtcgccgccgaactgcatgttgcagccgtaattctggtacagcatgtaaaagtcaaagctctgcatgatcatgtagttgaactccaggaaagtaagtcccttctccatcctctgcttgtagcactctgcagccagcatccggttcacggagaaatgcggcccgatctcccgcagcatatcaatatagttcagatccagcagccagtccgcattgttgaccataagcgccttgccttcggagaaatcgataaacttgctcatctgtcttttgaaacagtcacagttgtgctggatcgtctccggcgtcatcatggaacgcatatcggttcttccggacggatcaccgatataacctgtcccccctccgataagagcgatcggcttgttgccggcatcctgcagacgcttcatgagacagagcgccataaaatgtcccacatgaaggctgtccgccgtcgggtcaaaaccgatgtaaaacgtcgctttcccattgttgatcaattctctgatctcatcctcgtccgtcacttgggcgatcaaacctctcgcctgtaattcttcataaattcccatagcttacctctcctttaatatattgtctgataattagttgaatttgcaaaggggtcagacccctatggccataggggtctgacccctttgcaaattcctgccgcatgcgccaaaaaaccccgtccttataaaaaggacgaggttatgctcccgtgataccaccttcattcacctgcagctcacgctgccggtctctgtaagctgcagttacagcttgtgcacgataacgcatgccccgcgtcacagcctacctgccttctttaggtgaaggtttcggtgtgaagctccaagatgtattcacagcctgctctttcatgcgcctctcatcttccggctgctttctgtaagggtgtgctggctgttactttttcttttcaaagctttttctctgattcttgtcttgttgtctgaaatggtaacgtatttcttattttttgtcaagcaggaaattttatttctctggaaaagatccgcctaagtgatatggacacttctgcctcaggcactgtctgttctcttgggaaaatgtacatacgatgcgctcaggcagttccatctctatgccggtctcttccctcaccaccgccaccgcttctttcacggcggtgaagcagtccctcttgcagcagcgcggtccgcccaggtctgcgatcgcggcaagcgccctggacgtcacccggttggacatctgccacgaccggccggtgaggggcgtcgccttcgtgatgatgctcatgaagatgcccgtactcaccgcagccccgcagcagccccacatgccgcacacaccgcctgggacttcacttcccctggcccgcatctcctcaagcgcctgagagatatcaatgtcaccgccgcagttgtgatatgcggccagaagcgcagcgccggccatcacatgatgctccggcccgtgcatatatatgaacggattctccatgagttcctgcatgacagcgatcggactgcgggatgtggtcgtttggcatccttccattatcgctgcgattcctttttcagcgtgacagccgtcacatacgaaatgcccttcttcgcaggacgcatggctctcaaagctctgcccgcagacggagcacttcatttttcctgccttgtcataatatacaagctctctgccgcacataaggcaggcgccttctcttctgtccattttatctaaatcctttttccatctttgatgacagccttcaggttcaattctctatcaagcagcactacatttcccttcttacctggtgtgagcgaaccgtacttgtcatacgcaccgaggctttttgccggattcatggtcgcgcacgcgacagcagtctcaagcgggatgcccatctccttcaccaccgtgcgcatacagtccagaaggttcgtcgcggagcctgcaagagcgccgtttgacacaagggtagcgcggctgcccgtcacattcaccgcaagacccccaagcgtgtattccccatccggcatgccggtcgcgcgcatactgtcactgatcaggataatgcggtccgctccgagcatcttgaacgtagcgcggacaaccgacggatgaatgtgcaccccatcacaaatcagctccgccgtcacatgctcactgtccgccacagcgccgataacgcccggagcacggtgggtaaacggcggcatggcattgtagagatgtaccgcatgatccgcccccctgtcgtaggctgctttcgcatcctcgtagcttgcattcgtatgtgccagcgatacattcacttcatccttcacctgctctacaaattccaacgcgccttccctttccggcgccacgccgatatatttgacaagcccctgggctgcgctctggaaccggtgaaatatttctttcgtacacgggataatatatgtggcgtcctgggctccttttttctctttactgatgaacggcccttccatatttacgccgatcaggtctgcctcgtccgccgcctcttttttatacgctgcggcggtggcgagaatctcctccagctgctccaccggaagtgtcattgtggccggtgaaatggcggtcacgccgatggacgcctcgtactttgcgatctcatgaatggcctcctttgtcccgtcacagaaatcaaagcccttgcatccgtggaaatggatatcgataagccccggtatggcgtagcagccttccccgtcgatgacttcccctccgtcttccctttctccggaaatgagaccgtccctgatcacgatctcaccgtcttcaaatgtcttatcttctttaaatacttttacgtttttgatcaacataccttttctcctctcagcgctgttttgccggatgatcatatatatttctccggctttttccgctgcagcgcccgcagcgtgttgtcgtgcagtgtctctttctcatatttatcctgctcaagataataagagtagataatgtcaagcatcacgaggatcggaaactggggagagatgacatttccgtggttcagatgtctgagagacggaataagcagcacctcgtcgcagaatttatcgaactcttcattgtttttcgccgtcaccaggacagtcctggcccctctttcatgtgcctctttgagcagatacagcacttcttctttctcaccgcttatgctgatgccgaacacgagacatgtctcattttgaaatacagcctgcatcctcataaggtcgctgtcctgtatggaatcaatgtcaacgccgattctcatgaacctgagcttcatttctctggcagtgagccctgagctccccatcccgcagacaaatacccgggcagcccggttcagataacggctgatcctggccacctgtacttcgtccacaagactgtatgttttattgagcagctcctggtacacattcagcaccattctcgtattgccggtcatggattctttcttttctacaaaggtctcctcatactggtacacaaactcccggtagccccggtagccgcatttcttcgcaaaccgggagagggacgcctcggacacaaagagcaactccgccaccgccctggctgaaaagtccatcttcttcctgttctggataaagaagtcggctatattcttttctacggttgtaaaattatcataattcgattcaataatcggtactacggactttacataatactccatgacccaccagccttctctttgtctacgcctctgctttgcgcctctccccggactgcctttctctgaagtggtaaaatgctcccagcatcccggcatcattcctgtgccttgcgaaacagatcttcgtgcggtccgccacgcttggaattagatatcgggtgaccgccgcctctatcttctccttcaggtaatcctcctgcgccatgatgcccccgccgagcaccaccgtctcaggattcagaacataacagatattggcgattcccatgccgagaatgtccgccatctcatcgatggcccggatgcagatgtcatctcctttttcagcctcctcaaaaatgcggtagccgttccagtattccaccggctcactctttcgctccgccaccttcttcgtcaggatacttgcggctccaagcgtctgaaagtcactgccgcacatcctcatataacctacctcgcatgcgctgttactgaagccgtggtatatcctgccgtccagcacgatgcagcccccgatcccggtgccgacggtgagcatcagtgtacttttgctccccacagccgcgccggacacagactccgcaagccccgcacagtttacgtcgttttccacctcacacggaacaccaaaacgttcctccagaactgccttgaaccttgtgcctgcatattccggtatgagcggagcggagtgaaagatctcccctttctctgtatctaccattccggccgtagatatacagatcccgctgatctcttcgctgtttttaaattcctccacaatggcggacgccttggccagaatcgacggcccgcctctgtgcgcctccgtcttcctctcacgctttgtgagtatacggccatcctcatctatcattccatacttgatagctgtgccgccgatatcgatacttacatatttcttcatatattctcccaagccttttgtaatattttaaaacagtggaaggcactctttttgtgttacggtctcttcgaggcacagcccgctgttatcattataatataagacgatattttccgcaatctcatgcctgaatgggccagccctctgccgtagcagaagactgaccctcctcgtttctaatgaatctgtactttaaatattgcctttttgaccgcttccggcccatttacctgcacggcggtacggtgcgcgtcgtggggggcgcagatgaggaaatccccctctttaagcactacatgaccgttcttttcgccgtccatgggaaggaaatcgtccgccggcacatactccttctgctccatattttcgataaagttcacgtcgatctgttcctgtccggtgagcatcacatgtatgtccagataatctctgtgcgcttcccagaaacggttctgtgcgtctgttgtcgtgtattccacaatattgacaaacagcctgtttccatctatctcatgactccccttttcatatgccttaagatcatgttccccggcatagtcaaaacattctttcacctggcgctccaggaacggatattcatctaaattacggatatttccaaaaatcatgtccgcggactcctttcttcttttccttaatttttaaatactgtcgtgtccggcgccggtacactgtagtctccttttacctttctccagatcaggctcgccggtatacctaccacgagagacaccgcgatggagataagtgagtaggaccagatagagacgctacccgccggggcaaaatatttgatgccgaccataacggcagacgctgcgataaatgccgcgacagctccgaatgtattggccttcttcgtaaacgccccaagtataaatgtcccgacaaggataccaagcacaagacccatgaacccgttgaaccattcatacgctgatttcactccgccgtttgccagtaccatggcaatgacgatcgcaaagatcccgacaaagagtgatacgtactgtcctattttcgtctgcttttcaaagcttaattccttctttgaaagtcttgcctggatatccagcgtccagctggacgccacggagttaagtcctgtggacagcgttgactgcgaagccgcatagatagcggccagcagaagccccgtgatacctaccggaagttcaaaggcaatgtaggacgcaaatatctgatcctgtgccgctgccggcggaagtgcgttctgctgatagaacacatacaatcctgtgccgatgagataaaatacagtcgcgataaagatggacagtgctccgtttgtgagcatcatcttattcagcttcttcgtgtccgtcgttgttgtaaaacgctgtacaatatcctggcttgatacgtaagagcccatcgtgtttaatccagctccgacgatcatgataaatacactgtcttttaatacatttacatcaaagatcggctggtcgaccgcaaggaatttatgctctgccgtaaaggcgtggaatacagctccgatccctccgtcgatattggcaagcagaaatacgagcgcaaatgtcacgcctatcagaaggacagaaccctggataaagtctgtccagagtacggacttaagtccgcctgtgtacgagtagataatggcaatgacacccatgatgatgataagaacattcacgctgatcccggtcaggcttccaagtaccatacacggcaggtacataatgatggacatacgtccgacctgatagataataaacatgaccgccccgagcacgcgcagtcccttgcttccgaacctcagctccagatagtggtaagccgtatctatgtcaagcttactgtatatcggaaggaaaaacttgatcgtaagcgggatcgccagcagcatgccaagctgcgcaaaccacatgatccatgtcccggcataagaatttcccgcaagagacaggaaggatataggacttaacaaagttgcgaatatagatacggaagttacccaccacggcacggttccgtcccctttaaagtattcttttcccttcatttctttcttggcaaaatgaaggccggcgaataacaccgctgccaaatatacgatcagaataaccagatcaacgactgtaaaaccctgcatcttctcttcctcctaaagtgttgtcctataaatatttcgcttttgcatccatgatcatctgtgcggcttcttctacgacagccatatctgatccggcaagtggcggaagcggtctgcgcacgccgccaagctcaagcccttcgttctttttaaggatctctttgatcacgccgtacatgttgccatgggcggaacacattttgtatatgatagaattgatggcgtactgtaagtctttcgccgcttccatctctcctgctttcacgagttcgtcgagctttaagaacagctccggcatagccccgtatgttcctccgatagcgccttctgccccgatgacgcgtccgctcataaactgctcatccggtccgttgaagatgatataatcttctcctgccgccgctttgaacatctggatgtcctgcaccggcatagaggaattcttgacaccgatgactcttggattctttctcatctctgcaaacaggtccatcgtaagtgcaacgcctgccagctgtggtatattgtagatgacaaaatctgtctcaggagctgccgcgcttatatcgttccagtattcggcaatggcgtactccggcaggtggaaataaataggcgggatcgccgcgatggcatccacaccgagtttctcagcatgggcagccagtattttgctgtcctctgtattgttacaggcaacgtgggcgataacggtgagccttcccccggcagcttccatcacattttcaaggacggtctttttgtcctccacgctctggtatatgcactctcctgaagagccgttcacatatacgccttttactcccttttcgataaaataacgtgtcagcgcctgcacaccttcgggactgatgtttccgtccttgtcataacaagcataaaatgccgggataactcctttgtacttgtccagatttctcataatacatttctccttttacatgaatatatcagttatattgttacctgtttattccaatacatccgcaaaagactttgtgatcagctgcggtctcgtaattatggaacctaccactacggcaaatgcaccgagttcaatgactctttttgctttttcaggtgtgttgatattgccttctgcgatgaccggatgctttactttggcaacaatttttctcaaaacttcaaaatcattttcttctattttcagatgtctgctctgcttcgtataaccgaccattgtcgtcccgatgaagtcaaaaccaagttcgtccacgtgaagggcctcttccacggtagagcagtcagccatgaacagctggtttggatactgctttctgacctgcgcaaagaattcatcgagcgttacgccgcccggccttctgtctgtcgtggcgtccatggcaattatctccggctttacttccatgagctcatctatctctttcatcgtcggggtgatatatacactgcagttttcataatctctcttcacaataccgatgaccggaagatctacctgagattttatctctgcgatatcctccttcgtattcgcacggataccggacgcccctccttctttggcggccagcgccatccttcccataataaatgaagaatgaagcggttcgtgcggcagcgcctgacaggaaacgatcagttttccctccagctgtttgattcgttcattcatgttcttctccctccttgctctgtctgatataaagtataggcctgtatgtttttattttcaatatgctttgaacgttctgaaagttctttcacctttttccttttaacatgtctccaacgacaatattttatgcgcttttttagcaaatctgcacaatgacgcgtaccttctttctaataattatttatttgttgaaatcttctgacttattgatatactaattagtaagggaattgctccttgcagccggccgtatgaggctgtacatatattaaaaaagaaaggaaatggagaacactatgaaaatttacagagcgaaagactatgaggacatgagccgcaaagcagccaacattatctctgccgaggttattttaaagccagactgcgtgcttgggcttgcgacaggctccaccccgatcggcacgtacaagaatctgatccaatcttatgaaaatggagatctggacttttccgacgttacaagtgtcaatctggatgaatacaaggggcttggtcctgaccatgaccagagttaccgttatttcatgaacagcaatctgtttgaccatatcaacattgacaagacacgcaccttcgtccctgacggactggaggcagattccgacaaggcatgcggcgcgtacaatgacattatcgcaggctgcggaggtatcgacctgcagctgctcggactcggccataacggacatatcggcttcaacgagcccgccggtgagtttgaaaaagaaacgcactgcgtagatctgacagaaagcacgatcgaggccaataaacgtttcttcgcctcagaggcagatgtgccgaggcaggcatacacaatgggcatcaaaactatcatgcaggcgcgcaaggttctcgtcgtcgtaagcggaagcgataaggccgacatcctggccaaagtagtgaacggtcctgtgacacctgcagttccggcctccatccttcagatgcacaatgacgtgatcatcgtggccgacgaagcggctttgagtaaaatgtaataaagcataactgcgccggatctgacgtataagagtcctgtacgaggagaacttcctcgtacaggactctgtttttatcccgcttatccgagatatacggtatcttcctccggcgcccgggccggctgcagatcgatgagatatagtacgggctgttcgctgccgaatcttgtcacagcctcatattcaaatcttgccctgacccgcatccactgacgcggctcaaagaccacctttttgccggacttgcacggatatccgtaaaaacggatgtccgccgcgcagcatgtcattatttttcgtccgggcacaaacatcgtctcttccattcctttcggacggaacacctgggcgagaaaacgtatctctttgttaagataatattgcggatgctcataagcgtccacataccagacgccaaaatctgtatctcccacttcgatgatctctctttttacatcgtaaggaaggtcctcttcagacggttccatgatatgtccttccatgtcctcaaagataagctggctcatcggattctggacttttaccgctcttcggaaaccggaacggtccattcctttcgggcaccggtttactacgatcagctcggactctgtaagctgctccatgagcagatttctcatattcgcaagatacataccgagtgttgcgccgttcaccgtcgaatatacaccctgcagctcaaagccgcgggggaactgtgtcttaagcagctcctcaagcttccacatgccgttgtattcaatgaccacctgggcggggtgatactgcttctcacagtttttaaaaaactccgtactgagctgttccggccgctctattttcagcactgccatatccttttctttcagatatgcctcctcatactccacctcgccttcttcacactgaagaagaagcgtaacgccgggttcgatccagtcctgctccatcagcgtctctttcacaagtgtcgtcttgccgctgtccagcagtccggtacagataaataatggtattgccacgtcttttcctcccctctgtctgcacgctatacataaaaaagcttttcaagttctgcttcccttaagtctgtcccgatcacacagagccggccgctgtattccgcctgccccggccgtatttcacattcctccggcacgaggtcgaactgtctccacattccgtctgtcatctgaacgattccctttgccctgagaacgatgccgtatccctctgtctccgccagtgccttgaccgcataatcgagctcttcttctgtatatctgtgcgcgctctcacagctccagcttgtgaacacttcatccgcatggtggtgctcctcacagccgcaattctccccgtggctgtggaggtgcgggtgttcctcatggctgtggctgcacgtatggtgtccatgcccatgagaacaagcatgcgccccgtggctgtgcagatgttcaccgtccagaaggccggcctgtcccttttgcgcggacagtgcattttgtatggcgttcccgccaagcacatcccatcttgtagtgatgaccggcgcatccgcattctcccggcgcagcatttttacgcacgcttctatcttatcgtcctccatcatctgtgtcctgctcataacgatagtggacgcatgttccacctgattccggaagaattcaccgaagttcttcagatacagtccggcttttctgccgtccacaacagtgatgaggctgccgatctctatgtccgtctcttcctttacctcccggaccgcacggacgatatcggagagtttgccgacccctgacggctcgatgatcacccggtccggtgtatgttcctttaacaccttctgaagtgccctgccaaaatcacccacaagggtgcagcagatgcatcctgaattcatctccgtgatctccactcctgcgtctttcaaaaaaccgctgtcaattccgatctcaccaaattcattttcaataagcacgatcttctcatccaaaaacacttcaccgatcagcttcttgataaatgtcgtctttccggctcctaaaaaaccggatataatatcaacttttgtcatactctccgcctcttttccaattgttgcaccgcctctatgctaccacaaactcccggaggaagcaaatacggtcagaactcctctgtaagaacgccccacatgacagataccactggctttttctcctccggatcagaaaaaagctgcagacccgcagaatgttatgcttctgcggatcgacagctttttataaattcacgtcctgctcaagtagacaccggatgggactgcttttgtttctttacagtaatcctccgatggacaagaacaacggtgcaaatacgagtgacacgatcgtcatcagtttgatcagtatattgatggacggaccggacgtatccttgaacggatcgccgacggtatcgccgactactgccgctttgtgggcttcacttcccttgcctccgtgattgccgtcttcaatatatttctttgcattgtcccacgcgcctcctgcattggacatgaagatcgccatgagcacaccggtcacaagcgctccggtcagcagccctccaagggcggcaggtccgagcacgattccgatgacaagcggcgccgccactgccatgattccaggtacgagcatttccttcaacgcggctgtcgttgaaatggcgacacaggatttataatctggttttgtcgttccttccataatgcctggcatggatttgaactggcgtcttacttcctcgatcatctgatatgccgccttggatacagactgcattgtcatggatgaaaacaggaacggaagcatgccgccgatgaacagaccgatgatcacccggttgtccagaatatctattgtcttaagatgtactgcctctgcgtacgaaacgaacagcgcaagcgccgtgagcgctgcggaaccgatggcaaatcctttgccgatggctgccgtcgtattgccgactgcatcgagcttatcggtgatcctgcgcacttccggttccagaccggacatctcggcgataccgccggcgttatccgcgatcggcccataagcatccaccgcaacagtgatcgctgtcgtggagagcatgccgaccgccgcaagtgcgatgccgtacaggccgcacacctgaaatgcgacaaaaataccgacacagatgaacaggatcgggacagccgtagatttcatgccgaccgccagaccgcttatgatcgtcgtagcggcgccggtctcagactgctcgcttatctccttaactgacttatagtcaccggaagtgtatacttccgtgatgataccgatgagcagacctacaacgagccctgccacaatggcgatggccgctttgaagtctccgaaaaagtaattgctgaatataaatgcaacgatcacaacgataacactcgtcgcgtatgttcccatcttcagcgccttatgaggattcgatttctcatctcctctgacaaaaaaggttccgagaatagaaccgatcaggccaagtcctgctatgatgagcgggaatattgctcccggcgccttaaagtagacgatccccagcgtcagagccgatatcaatgcgcccacataggactcgaacagatcagctcccattccggccacatcgcctacattgtcgcccacattgtctgcgataaccgcgggattacgcggatcgtcttccggaattcctgcctctaccttgccgacaaggtcggcacccacatcggctgccttcgtatagatcccgcctcccacacgcgcgaataacgcgatagaggacgcaccgagactgaagccggaaagcacttctacattgccggtgatcagatatatcgtactgactccgagcacgcccagcccggccacacacattcccatcactgcaccgccggaaaacgcgatggaaagggccttgttcataccgcttgtcttagcggcattggcggtccttacgttggcctttgtggctacctgcattccaaagtatccggccagtgtggagaataacgcccccacaacaaagcagaccgccgtgatccagttgccgatcccaactccgatcagcacaaacagaacgatcacaaagaatacaagtatcttgtactccgctgtcagaaatgctttggcgccatcgctgatggctcctgcaatttctttcatcttgtcggttccctcttcctgtctgctcactttcgctgccagatatgcagcaaaaagcagagcaagaatcccaaaaacaggaaccagctttaacaacatctccataattttcaatcctcccacagatttgataagtaattatatattatcataaatataacgcttgtatagccttttttcggatttaaccggatttcctcaaaataattttgccgttttgaagaaataattgcattttatccaatcaaaaagaagtcaattatcttgacttctcttccgccagaaacgccgctccgagcgctcccgcatacctgccgtattccgtcggctccactgtctggccgaccttctccgataatatttttgtaaaataactgctgccgctcagcccgcctgtcagtatcaccttgggcgggaggttctttttcctgcacagctgcgccaccttcgccgctacggagtccacgactcccgccgctatatcctcccgtttacggccctctccgatatagttgatcacctccgactccgcaaatacggtacagagggaactgatggaaagaacttcccctgtctttgccagatcgaataattcctgcagagttataccgagcctgtttgccattatctcaagaaactttcctgtaccggcagaacatttgtcgttcatgagaaagtcgctgaccatcccgttctgtacgaggatcaccttcgtgtcctggccgccgacgtctatgactgcgcagttatttcccgccaactcacggccgcctctggcgtgacaggttatctctgtgatgacatagtcggcaaattctacggccacccgcccgtacccggtagccacgacttttgtctcttctgacaggacatcgatcccgtcttccctaagctttttttgaatcgtcagcgacgtctccttgctgctccatccggtcggaaggacaaatcctttttctgccccgcctctcacaaccacctttgaggcggttgagccgatatcaatccctacataattcataacgcaaactccatctaacaatatttatccctgttgggatctatatctctctttatttctacaatatccaatatttctatcccgtgctctacgatacatcttttcaccgtctctatatcatccttttggatcagcagagagatgccgcagcatttgctcgcagaccggggagtcggggcgatcaccgcccggactccctctgccttcagctctctatgtaaccgcataccgttgtcgtgattcggaaataatacataatgctgtactttatccatcaaaccactttcctctcctcattgcttaagcattgttcagcatttctataaatgcgcttactctcgtacgaagctgctgcgcatcactgtccgtgtaatctgtctcgatgccgaggaccggaattcctgcttctttcatggctcgttccacaaaatacccttctgtgtcatacaggctgcagaacttcagattgacatcgatgatcccatccaccttatactctcttgcaaggcgtagtatatcgtcaatacggccctcattcggcgtgaaacaggcacagttgatgttcatgtaccgttctgccagcgcctggatctgctcttctactgttgtccggctttcgtccaccagatgctcaaaatagcgtgtgcctgtacacatttcctcacagactacagccccgccgcttgtctctacaatattatgcagcttccagttcgggatcgccagcggtgttcctgtcagcatgatccgttttgtaccatcttttaccacactgactccgtttttcacgcgctcgtccagttcgtcacagagcttgttcgtcatttctgcaaaccgggccgggtcatcgtagaacgcgatctgagagatgagcagtgcgtcgcacccgctgatcggaagtctctccttctttctcagatcatacagccgctgcagcgcttttctctttgtattgatcagctgaatgccggccgccagcttgtccgctgtcacggagttgccggtgaactcctccaccttatctttaaactcggcgatctcttcggcccacgccgctatgtccttgccgcgcttcatctgcggaaggttcatcacatgaaccggcacgtcctcggacagaatctcccacgcttttttcttcccgtcacacgtcgtctctcccacatacatatccgcaattctgaaaaacggacatgtgcggtccagccttgctcctacggacgctttgatgagcgggcacgtgttggttgggagtaccttctccccgcccgggacccagaactgggagccgccgcacagtcccgtcgcgatagcatcagccgcaaatacaatttcatccggaacgtacacacagaacgtaccgaaaacctttcctccctttttctggtgctcgatcagctccgccgggcggactccgtggatctcggccaccacaaagttaaaataatccataccttccggtctgttttcctgcgacagatagacatcgccgaacgcctgcggcagtacctcgcacaactgatcatgcgtctcaatatccatccccaagtctttccacatctcatgataatcagccataatttcctcctttttcaaaaggggtcagacccctatataccataggggtctgaccccttcgacaatttaagataaccgtaacactttcctcttattacggcaatataatctgaaaatatggcttattgtttttttcgatatgaaaattcttttatttatcatatctatattgataataattctcttaatgcagcagtacagcgttctatttcttcatatttattgtccgcactgaacgcaaatctcacggttccctgcggatatgtatgcagagatttgtgcgccatcggggaacagtgcagcccgactctcgtcattatgccgtactcctgctccagccggaaggcaagcaccgcattgtcctgtccgtcgaaatcgagtgatactactgccacccgctcctgaagatcttttcttcctataattttcactccgggcagctgctttacctgttccagaaaagctcctgtcagctccatctttttcctgtggatgttcctaagcccctgcttttctatataggaaagggcagcatgcagtccgatgattcccggcagattcatcgtgccactttcatatttatccggcagctgcccaggcatataaagggaatctgactggcttccggtaccgccggctatgtacgggaccatgttttcattcaatctgtccgatataagaaacccgccgatcccctgggggccgagcagacctttatgccctgtaaatgcgagaaaatcgatgttcatctgctgcatatcgacctcaatggtgcctgcagtctgcgccgaatccaccgcgaaatacagtccatatttcttacatatcctgcctgtctcctggattgggacaattgttccgcatacatttgaggcgtgcagcatgatgactgcccgtgtgtttgcttttatctccctctccacatccccgggaggcacgtttccttcttcgtccgtgtaaactgcgctgtaggtaactccctgttcttccatctgtttgagcggacgcataacggcattgtgttccataccgcttacgatcacatgatcacctgatctcaaaaatccctttatgaaatagttcagagaataggtgatgccaggtgtgaatgcaacctgtctggaactttccgcgtgaaagagagcggccagtttctccctcgtatccagtaccttgtctgccacttcataggctccctcgtaactgcccctgttaatgttaaatgcgccgttctccaaaagggaagccaccgcctgcgcaacgcccggcgcctttggaaaggatgtgcttccgttgtcaaaatatatcttattctccatagtcgatctccaccaataccagaccgttcgggggcgccgtcacccccgctccggtcctctcctttgcctccagtatctcttttaccttctcaggctcataaaatccccgtccgacacgtatcaatgtcccggcaatgatacggaccatattgtagagaaagccatttcccgtgatccgcatgatgatctccggcccgtcactgtcgatccgcagttccgtcaccgtccgcaccgtatccttcacagatgtgcgcacgttgcagaagcttgcaaagtcatgctccccaatgagatatttggcgccttcacgcatcttttccacattaagcggaaaggaaatatgagtgcttgtcctccgcttcagcggattttgtaccggagcattgtaaatatgatactcatacgtcttgatcaccacatctctgtaccgcggatgccagccggccgggacttcgtcggaccgcacaataacgatgtccttcggaagccgctgatttagcgcatacgccatccgctccggaggaatggaagacgccgtgtcaaataccgccacattaccgagcgcgtgaacccccgaatccgtcctgctggcgccgataacatggatatcctcccctgtcagcttcgtcagcacaccgttcagcacctcctcgaccgtgatcccgttaggctggatctgccagccgcagtaatccgtaccgtcataggcaataaccagccggatacgcctttgggggattttggggacggggtttttctcgatttcctccgtccctaactgaatttgccctgtccctttcttcattttcacctcgtcctttatccacattttccacatttgcttgcacgttatccacataaaacccatggggacaccctgattttaattggggacggggtttttctaaaaaacctccgtccccaattaccagccagctaaaatatccacacgtgcagcggcacgtaccttcctatcacgaacacggccgcaacgtaaataataactgacgcatacgcgatatagtctcttttctgatactgcagcggtttcatctttgtccttccttcgccgccgcggtagcatcttgcttccattgccatggcaaggtcattggcccgtcggaatgctgagacgaacagtggaacgagtatcggtatcatgttcttcgcccgctgtatgatattgccgttctcaagatccgcacctcttgcgatctgtgccttcattatcttgtctgtctcttccagcagtatcggtataaaccgaagcgctatggacatcatcatggccacttcatgtaccggtacgtgaatcttgttcagcggatgcagcaggctttcaatcccgtcagtcagctcattcggtgtggtagtaaaggtcataagtgatgaaccgataatgagatatataagccggaccgccatataaactgctgttctcaggccgccctctgttatggtgaatatccatgcatgaaaaagcacctctccatcccttgtcagaaacagattaaacagcaccgtgatgagcagcagcataataataggctttaatccttttacaataaaagagaacggtaccctggatatatttatcactgtgaccaaaaatactgtggcaacaatatagcccggaatacttttaaacaaaaaaagggaaataaggtacagcaaagtagacaccagttttacccttgggtccagccggtgcagtatgctctttgcagggtaatattgtccaatcgtaatatctcgaatcatcctctgttctccaataccttcattatttcatcggcagcctctgccgccgtcgtcacatctgtcttcacaggaaatcctttctcctgcaggtcatgcatgatgtatgtcacctgcggagccgcaagtcccactttctcgagttcacgataatgcgcaaatactttcttcggcttatcgttatacatcacagttcctttattcatcacgataatgcggtccgcatatcttgcgatatcttccatactgtgtgagacaaggataaccgtcatatccgtctgcctgtgaaggtacgcaatctggtcgagaatatcgtcccttcctttcggatccagtccggcagttggctcatccagcacaagcaccttcggcctcatggcaagaactcctgcgatggcaacacgccgcttctgtcctccggagagttcaaacggtgaagaattataatatttctccttcagtccggtaagccggagcgcttccaacgctcttttcctgcactcttccggcaggagaccctgatttttcggcccgaagcagacatctgtcataacatccacttcaaacagctgatgctccgggtactggaatacaaggcccacctgactccggagactgcgcatatcatacccttcggcatatatattttcttcgttataatagagtgccccgcttgtcgcctttatcaggccattcaggtgctgtataagcgtagacttgccggaaccggtatgaccgatgatccccacaaactccccattgggaatctcaaggcaaatatctttaagcgcctgcttctcataagcagttccgggactgtatatataattcaaatgttctaacctaattgacataacgcctccaccaattcttccttccgcagtatgccgtccggcagcggtactccccgtttcttaagttcatcggctaatatcgtggcctgcggcacatcaagacggtacctcttcagctcgtccacccgggaaaatatctccctcggcgttccttccatcacaacacgcccatggtccatcacaaatatcttatctgcatccaccacttcatccatatagtgggtgatgaggatcacagtgacatgctttttccgcctcagttcctgcacggtccgcaacacttcttttctcccggccggatccagcatggctgtcggttcatccagtacaatacatttcggctccatggcgatgacacccgctatggcaacccgctgcttctgaccgccggacagcttgttcggcgaatgactcctgtactctatcataccgactgccttcagactctcctccacacgcttccatatctcctccgtgggaacaccgagattttcagggccgaaaccgacatcttcttccacaacggttccgatgatctgattatccggattctgaaaaaccatcccggcagactgccgtacatcccagagcttatccggatctttcgtatccattccatttacccacatcgtcccttccgtaggaaccaatatggcattcatatgcttggcaaatgttgacttccccgaaccgttatgtcccagaacagcaataaactgtccttccttcacatcgatatccacttcatctatcgcgcgggattttccgataacattaccttcctcatcccgcttttcatattcaaataccagtttttcggtttggatcatatccataaggcacaggccctccatcttgtatacacaattactgttcttaattgtacgtcaagaagtggctttttgcaaggtacagtttcatccaatcgcgacatgctaccatactaaaaaaagcagatttcctaagaaacctgctcattcttcctgccacactgcaccgccagcccgttgacgagcagaattccgatgctcacacaaatcagcgcggcaaaatttttcagagaaatgatctgttccccgagaataacggccgacaaaaatacgccgaatacagggatgctgaatccaaaaatagcaacctttcctacggaattatatttcagcaatatagtccacaggctgaatgcaacagcagacagcattgccatatatatcagaagggcggcggactttccgtcaaatcccgcaatacgtccgcctgccgcaaatccaatcaccgtgacgatgaaaccgccaaacaaaagctggtaggccgtgatcgtcatggcgctttccagatgggatatctttttcatgataaccgtactgattccatagaatacggtacagatcaacaccatgccctctccgccgaacgaaaatccgtccccccatgcgccgggttccagattgattattatcaccccgagaaaaccgaccgcacagccgacgccctgcttccacgtcagcttctcccctttgatcaaaagaggcgccgcgagtatggagataaatgcattggacgcatttatgacagaacctttcgtccccgtcgtatttgccatcccgatatagaagaacacatactgaagtgttgtctgcatcagtccctgtctcagcacgtacggcaccgaacttttcttcatgcgcaggatacgtctctccatgacagagcccattataaatgtgaggacgcccgccaggaaaaatcgatacccggcaaataatatctgacttcccgtcgtctcaatgtgcagccattcatatcccgtcttcacacatggaaacgcactcccccacaatgcacagcaaagcagcgcgaggagcccccgcactgccggtttttgtaacgtccgttccattttatgccttcctatgctttctcaggctccggataatccacaccgtccgtgtcaacaataacctttttcatcttctgttcctccagcggcctgtcgctgtaatccgtatccgctgccgcgatcttgttcaccacatccataccctcgataattttcccgaacgcagcataggaaccgtcaagatgcggagaattcttgtgcataataaagaactgagagcctgcggaatccggatgcatagctcttgccatcgaaagaacaccttcgccatgctttaaatcatttgaaaaaccattctggctgaactctcctttaatattgtatcccgggccgcctgtgcctgtcccgtccggacatccgccctgaatcataaatccactgatcacacggtggaaaataagtccgtcataatatccctttcctacgagtgagataaagttatttacagtattcggcgcaatatccgggtataattccgccttcatcacgtcgccgttttccatttcaaatgtaacgattgggtttgccatagtcatacctctccttttcataaacttaccagcccattgtaacacagggacagggcagattcaattggggacggaggttttttaaatttcctccgtccccaattagaatttgccctgtccccatttgaattcagtgtatcccttttcatttatataggatcagtccgcctttctcttcatggccggtgtcccagagttcccggagggatatcctggccgcctccccgtatgttgcggtcactatctcaaggccatcttctttttcttcgtatcccactacgagaaaccagtgccatatgaagtctttgaacttctgattcttatgtctcagcataagatacggtaccggataaccggcatcgatctgttgtctgattttttccgcagcctcggtgtacgggcggtctcccggaagaatgtccatctgaagctttatatcacagccttccctggcatttacatcgctgatataacggctcagtccgtccacataccactgaggctttttcaccccgcctgctctcggtctgatgtatggtttcattatctggctgaatcttttgtaatcttttaccgtcagcccgtctcggtcaaatggatatagctgtctcataccgggccggcgcgcaaaatatatacagctgtcacaggccgtggccgcgccgcagccgccgatattcatcaccacgttggtaaaccactcctggtttcctccaaaggcgccttctattgtaaaataatcgagttctcttttcatgtcatcaccttttttcttaaataaatgccggcttcctgtatatgcctgcaaggatcaggataacatatcccacacggaaatgccacacactgatcggcttaaagccccataattgaccggtaactgataaattatatgctgtagttattatatgcaatataccttaaaatgtcacatcaataatttattaatcttttaacatcaataaaacagggagacacaacccgatgaagtgtctccctttcttattctctgcttctttaaaatgcaaccgccccagtgtcagtgccgttgataacataatatacagcgccctcttccggctttatgtaaagttccatggtcctgatatctccgactttcctgccggacttcgtccatgccttcttaactgctgcaaccatatccttttcttctacctgtttgccgtaatactctactactgtatttaccttcatttcttttttaactgccggcttctttgctgcagtctttttcgctgcggtctttctaaccggtactttcttttccggctcagcctttactgcttctgcctttttgacaggctcagccttctttactgtctccgccttctcctttacagcgtctgcttttacgttcacaggctccgttttagctgcggtttcttgtttcttagttcctgtttttgtagccatattaattcctcctatatttcttaagcctcatcctcttcagttgtgaatattatatcacacctaatcagaattgcaattctttatcttcgacgtctgacgactaattgtgcatgtcctactctgtaccttcgtattcgtcagccatggatttggagtctccgctctctatcacttcctgtgtatccttgttgataaactgcactgtcgtattgatctcttcctccggaacgagattcatcccctggtacatattccctgccgcatacatcacaagcgctccaaaagactgcagtccgccgtacgccgccggatctaccatgatcttaaactccgtcacatcatcgttatacgtgatctctgtaaaagaagaataattttccttgtcctccagcagttcagagatagattcatcgattccttttttcatctctttgagaagcttttcgtgggtagacttgtccatcttataggtgacagacccatcgtcattgaccttcacttccttcacgccctctgcctttgcctcttcattaatgtccgccattccctcttcatcaaaaaatgatgccggaagtgtaagctcaatgtccttttcctctttcttgacagactcttctttcttatctgcctttttgtcttctttcttgtcgtttcccccgcaagctgccagcgataacgcaagcatcgcagccatacagatcaataaaaacttctttttcataaccttcctcctcataaactactcttttgatcaccgaatatcttcagtgtttaaataacagttttgcagattgcggcacatttgtcaacttgtacgcgccagccgccttattctccgatgatctttaccagcacccttttgtcccgctttccgtcaaactcatagtaaaatatctgctcccacgtcccgaagtcgagtcttccttccgtgacggcgacgacagtctcccgtcccataaccgtgcgtttcagatgggcgtccgcattgtcctcataaccattgtgtctgtactgactgtatggcttctcaggcgccagcccctccagccatttctcataatcctgatgaagcccgctctcatcgtcattgataaatacactggctgtgatattcatcgcattgacaagaaccatcccttcctttatgccgctttcaccgaccgcatcctgcacatcctgtgtgatatttacaagtcctcttcttgacggaagatgaaaatgtaattcttttctgtaagatttcatatattgacctcctcgcataatatctgttcatacactttagtctcatcatataaattctaaatggaattgtcaaacttttaaaaaacgtaataaaaggaatattttcgacagaaagtttgaattaccgcgccaaacctgttatgattaacgcatattctaatacttacataatacttacaggaggtactaaagatgagtgaagagatgaaatccgaagaactcactgagacaaaggcagaagaaactattgaaaatgccgaagataaagctgcagacaataccggcagcgccgaggacagttctaaggaaaacgacaaaaaaagtaccggcaaaactgcggaagaaccggaagcagaaactcccaaatcaaaactggattatgaagaagcctatcatagcatatacaaggacctgctggagcacctgcgcagcttctctcctacagatgagatcgcgtaccgtataacagaagaacacataacagagtatctggagggcagacgtgaagaaaagcaccaggaatacaaagaacgccgtgataaacggctgctgtcagctctcaagctgatcgcgatcctagtctgcatcgtattgatcgtatggttcctcaaagacagccaggctatcctcgtcaatattctctatattatcggcggactgatcgcgctctggatctggaaatatccgcacaataaggatgagtaaagacatctcatattttaatgaaataacaggagaaggccggccggaaagggcgcagacttctcctgttttttacctgcaaatattcttctgttcctaccttcaccggcttctgtgcctaaaaaacaccggcaagttcaagtacaacccctgctgccacgcccaccgcaaatagcacggctagtattttcatgttttcttttctctgtctgttcaccttgaacaggacaacgagaccgatcccggccccggtacaaagtcctgcgatgaccgaagcaaaggagatggctccgttcagatacagctgcgtaaggatgactgacgcggcacagtttgggatcaggccgatcacagccgcgatcacaggctgaaagactgtattgccaagcagcagcgtagacagttcatctataccaagcacttctatgcacaggttcagaagacctgtaaaaataaagagatagataaaaatcttcaccgtatgatggagtgcaggcttcaggatccctccgtcttcctcgcacccacagtcgctgcagagcgtcccgcactctttcgggacctcgatgcgccgtgagagaaaaatgtccgtcacataccccgcgatcacggcgatgatcacttttgtgagaagaagaaagaccacatccttccccctccccggattccccattataatgagaagcgcctcatccgaagtggcaataaacacggacagcagcgtccccacggagatgattccgcctgcgtacagattggacgccaggactgaaaatccgcactggggaacacatcccgccgcagcgccgactaccggccccgcctttccgactcccgccagaagcctcgccgtaaattcgccggaataatactccagagcctcaatgacgagaaacgccgcaaataaaaacggcagcatcttcagacagtctaacgtcgtatcgagtaatatatcttttaataaagtcatttacattccacccccgcaatcaggttaagtaatcattttatcttctttgtcgtcattttgcaagggcacatataccactttttttatcaacagttccccgtgtatacatgatccaggtactttgccgcctctccggcaagtctgtatacagtctgtatgtccgtcggacagccgtcctccatcctgaacgcagggaaaaatctcgtcacatgcagaggaagcttccggtcgatacctgcagcccagcgggccagttccctcatctccccggcggaatcatttttgcccggaacgataagagttgtcagttccacgtgacattcctgcgccgcacactgaataaaatgctttactgtctccaggtcccctcccagcatatgataatattcctccgtaaatccctttaaatctatgttcatggcatcgatataaggaaggacccggcggagtgtttcctccgttacagacccattcgtcacgaccacactcttcattttggcctttctgacaagaagcgccgtatctcttatgtattcgtaactgatcataggttcattataggtaaaagctattccgatatttcccttttctccaagctcagccacccgctttgccagctcttccggcgtaagaaaaacataccggcacctgtctttacccctcatggaaatgtcatggttctgacagaacggacagttcagattacagccatagctccccacagacaatacttttgtcccgggtaaaaatcttctgagcggcttcttttctatcgggtcaagcgcaagcgctgttatgtgtccgtaattcccacatactatctcaccgcctctgttcattctcgccctgcaccgcccggtctggccctcgtccagaacacagcggtgcatgcatacacggcattcttttttcatatctgtcacctgtgcctcacaacctcgaagcgctccagcttcaccggttcatgctcaccgattcccgccttctgccgggcaatggcgatctgctcttcgactgtgtccactccttccaggttcggaagcagcagtcccctcctccagcctctgctcacgataacgccgtaccgcttcacatccagttcttccggtccctgaatctcctccgtatctcccagcacatccacactgtacacaagctccgccagttcctccttctcaacaggaggaaaacgcgggtcacggacgcccgcactgaccgcattctccatgatctcttctgccagagaactatgcacaccgtctatcgtcccgatacacccgcgcagcgcgcccccctttttgagagatacaaatgctccggcacgcctttccgtcatctcttccggcagtccgccgggcagcttcatctgcctcccggtgcggatatatgtctcaagcgactgtctggcaagcctgacatacgcatccagaccgtcctgcccttctgatgccttctcctcttcttctgccttccggccggtgacatgatacgaacatatcccatatcctacgccaaaaggtccttcataggacaacctgcgggcctcaaccgcacagccgtccagcgcgcccgccatgatcataaacgaccggtgtccgcattcgcccgccttctccagaaactcctcggagaaatccgaaagacgcgcaaagtcgccctctcccatgatatccatgatcatcctgtcatattccggcccttccttccggtatccgtaagggccctcttctttcaagtaatgtgacagatctccgctcgccagcagcactgtctttctcccgagccgcttagccgtcttctgtatatattcgccaagcctgtaatggccggcaagcgaaagaccagacaggccgatgcggacgagcctgtactctttatactgctcattgacaaaataaagcggcaccatcgttccatgatccaggcttttctgccgttccccgcaggttcctgccggaaagccgtctctcccggccaggctctccagccttgcagtgaactctgcgtcataccgcacgtcaattttctcctgcgctgcccggaactgcccaaagtcacctgaagcccccgttcccggcgatatatgaaaataatcccggtacatcacggcatgaggcgacgtgaccacgatcgtgtccggacgaaggcgggctatttcttccgccgccatccgataagcctcagccgtggcggagacggcccgctcctgcccacggcccaccgccggcacgatgagcggaggatgaggtaccatataagctgcttccacagacatcgtatcatctcctgtctttatatgcacattccctatatacacattccttcactgtacggttactcttctaccattatcttgatgatctcttcattcgtctcccgcatgccttcttttccaagccttcccacatttttgatcgtagcttccacgccctttgtcacgataccgtcaccgccgtaaaactgctggccgttcttatacatatagtatcctaaaatgcctgcatccacagaagacgcgatcttggcggcacaggatgccttggcgccgtcgcatacaataccggacactatggcaagggcgttgactaccgtgtggatgacttcctcataacctccactgcacagatatgcgatgcccgcgccggcggcagctcccgcgctgaccgcgccgcagtaggcagacagacggcctatgcccgtcttctggtgaatggccaccagattagaaagcgccagcgcacggtacatcttgtcctcgccggacgcaagctccctggcatattctactacaggaacagaacacgtgattccctggtttccgctgcccgaattgatcaccaccggaagctcacagccattcatgcgtgcatcggaacctgctgcggccttcgcctttgccctcgtcttgatatcatccccgtacgtgtcaagcagcacacttccgatattagcgccgtagtcccccttcagcccttcgtctgagatcgccgtattataggcgatctgctggtccagtacgtcccgcacatcctctatgtcaagcgactggacaaaatcccagatcgattccatattgagcacacttctgtctgtaagtccttcctctttttcaccctctaccggaatctccagcagcttctccccattcttctctatgaggacaatatttgtgtgatagttggcgatccgcactttcgcatgatccttccctttatacactgtgacgataatatcaaatgtgatgccgttgtccacgtgaactaccttgatctctgtcttctcaaggaacgcccgcatctgctgaatctccccgtccgacacttcagaaatgacttccagctccttatccgcctttccggcaatgatacccgccgccgctgccgcagggatccccttcagatggtctgtgttcggcactatgacactcttgacattcttgataatacttccgctcgcctccacaagcactctgtccggcacttcccctagcacctccctggccctggccgccgcatacgcaagcgcgatcggctcggtacaccccatggccgggacaagttcctccttcagtatctgtacatatgcgctgtacacgttatcctctctgttcataccttcatcctccgtttctacatctccgcgtttttaaatctcatgatcatctcatttgtcaggctcagatccgatgccttcacagggatatcctcccgctcaaaccattctgccaaagccagctcctctttatccagcgtgatctcctcatccccatccagctcagcatagaagccaagaagcagcgtgtccgaaaaagaccacggctggctcttatagtatgtaatattctttaccttcagtcctacctcctccatgacctcacgccgcaccgtgtcctctatcgactccccgatctcggcaaaacccgccagcagcgcatattttttgaactcccggtttgcatatttggacatcagcagacggttcccatgggtgagtccgataataactgcgggcatgatcttcggatattccatattgccgcacgacggacacttcagcatacgctccttcccgtcctgtttcgtcctgcttccgcaccgtccgcagaatctgtggcttccataccagcggtaaagctgggcgccggtaatgccggcgaaagccatatgccgtggaactgccgtgcggaatatctccgtatcctccagcgtaaaatccccggcctcgtaaaaaccgatcccctctcccaggtaaaaacgctgtccgtctatagaaaacagatacgtgtattcctcatacagcccttccgtgtacggttccatttcctcaaaagtaggaaaggctatctccccctgccctgtcttcctcaaaagcacttttctgccgctgtagcacagcagaaagcttgcgccgtccggcgcttttggcctgtactcatttgaaaaacaatggggctcaatatcctgtatcatgatcacttctctccttctgctcatatttcttaatacattataccttaacagacgccggatgttcaatacgtatctgatctcacaaaaagagccaggctcctctgcgacggagcctgacccggtttttatcctatttactgtccgagactttcaaacagggaggccagtatgtctactgatttattcagtccgagacggcttacattgaggacaagctgataggatgacgcctttccccagtcctctcccgtattcgtctcataataatactttctctcccggtctattttcttgatcttttccgctgctttgcgctccggaagttcctgaagctgtgctattctcttaatccggtcttccttatccgcacagatgaacacgctgacacagttcggacagtcctgaagtacatagtctgcgcatcttcccacgatcacacagggacttctcccggccagcctgcggatgataccggactgcgccttatacaccctctcactgaggggacgcatataatcttccgcattcatgtaagccacatagtcgccaggtcctgtgatataagatgccaggaaactgctgagggcggtctcatccacttcccttgccgcctcctcgctgatatccagttcctttgccgccatcgccaccagattatgatcataaagcggaatgtccagcttcttggcaaggcgcatgcctatttcatgccccccgctgccgcactgacgccctattgcaataataacattatctgtcatacgatccactccttcccttgttgataactataaatatccgtccacttgtcttatttatattataccccttcagagaacgaattccaatagcggattacggttccggcgcctctgccctgtcaatgataaatgcctccacttcttctttcttcatgccgagtgcaaccgcaagctctccgtacagtctgtcctgtgccatgtgcagataacgctcatctcccgccgtaactttctttccctgtgcgattctgtcctgtctgcggcggtagatcgtcttaatgatctttatccactctctgcagtcacatttgtaaagcgcttctttaaacgccgcttctcttttcttctcatcctgaatccacagtgcatcgatatcatttatatgatccaccagctcgtttgcctgctctcccgatatcacaggccgcattataatcttttcgctgtccacaggtacataggccctgctgttgctgtcatacacgggcacaagtgtatagtacagccttttctttggcgcgccggttatgtgaacaggccccgtctcctttactctgcacacgccatatcttccacatacaatatactctcctacgtcaaacatccttgtcactcctattttatcacttctatccggcgttacaaaaatgccagaagaacgcacatcattctcctgacattttctttccttgttctcttttattttactacgaataaaataaattctctaacacaacttttgacgctcccggtttttcatgagaatgcacaacataaaggccttctgattttgttactttttaccagcatatcatccgagcagcagcgcggcgcgcgacacgagaaagcagagcagcatgcccgtcaccgtcggaatgaggaacgctgccgccgtccatttaagccctcccgtctctttgcgtatcgtgagaagtgttgtggaacacggccagtgcatcagtgaaaacaacatcgtacagacggctgtgacccacgtccagccattgtccacaaagagccggtgcatctcggaaaggctatccagctccagaaggctcccctgagccgtatatgccatgatcatgatcggtacgacgatctcgttggccggaaatccaagaataaaagccaggaggatgactccgtccagaccgaggagacgggcaaacgggtcgaggaaatcacttaggtgggcgagcagactcacacctcccgcatcgacatttgccaaaaaccaaatgacaagacctgccggcgcggctacgacgaccgcgcgtcccaggacaaacagcgtcctgtcaaatatagaacgcacgataaccttcccgatctgcggacgcctgtaaggaggcagttctaacgtaaaggaggacggcacgcctttcagcagtgttctggacaatattcccgagacgacaaatgtcatgactactccaagcacaattgcggccgtgagcatcagcgccgcaatgaccgaggagccggcggcgcttttcgtaccgataaaaaacatcgtgatgagcgctatgagcgtcggaaacctgccgttgcacggtacaaaattgttggtgagcatcgcgatgagccgctctctcggggaatcaatgatccggcaccccacaattccggccgcattgcatccgaatcccatgcacatacttagagcctgtttgccgcaggcacaacaccttttaaacggtttatcgagattgtacgccaccctgggcagatatcccgcgtcctcaagcagtgtaaacagaggaaaaaagattgccatgggcggaagcatgacagatacgacccacgccagcacccggtatacaccttcaataagcataccggtcagccattttggagccccgatatgtacaaaaagctccatgagcttatcctgcacccagaacagcccctgggacaaaagctgggaaggataattggcccccgtgatcgtaagccataggatcaccgtcaaaagcgcgatcatgacgggatatccggttctcctgctcgtgaggattctgtccagctttttgtccaggccccggtacccctgctctttactttgcacaactgctctgccgatatcctccgcctgctttacgacagtggagacgatcttatcctttagtgtattcgggtcaacacctctgctctccaacagtctgcgcgcctcattaagcgctccggagaccgccggctccttacatatatccgttcctgtcgctttgttcagctcttccagaagagaggtgtcgccttccagcagctttaaagccagccattttgcagccggcctttttcggccgtttctttcaaggatttctttcacggccggcaagacgagttccgctgcctgctctatttcttcgggatagtgcactttgaccggctgccggctgtccatctgagcgtccgccatctcatccatcctcaaaagaagaccgtcaagactcttcttttcccgcgccaccgcgcccacgaccggaacccccagtatatgttccagtttttctatgtcaatggcaatgtgctttctttttgcctcgtccatcagattcacacatacaatgacctcgtcgcatatctcgatcgtctgaagcacaaggttcaggttccgctccaggcacgtggcatcgcagactacgattatttcatcggcgccaccgaagcagatgaaattccgggcgatctcttcctccgccgaatgcgccatgagagaataggtgcccgggatatcgacaagcacgtaagaatacttatcggtactgcaaaagccctgggcattcgtcaccgtcttgccgggccagtttcccgtgtgctggttcatgcctgtgagattgttaaacaccgtactttttcccacattcggattgccggccagagcggccacctttgcgtctggcgacggttttctgatgataagctctgtgtccgccgccccttttcctgttgatctgatcgtcagtcccatctatgttatcacctcatttcccgtatcattatgcgtgtgctgtcttccgagcggatagcgatcaccgctccccggatcagatatgcggaaggatcaccgccaggactgcggccaatacattcaacaagcgtaccttccaccagaccgatatccagcagacgcctgcgtatgctcccgtccgacagcagctgctttaccaccgcgctctgtcccggttctatatcattcagacatacggccctgttcataaaattcaccaccatctcatacaatttagtctaaggaaactttctttcctacttctataatatagaaaaaccggtatttggttacaaattttcatgatcggggaaataaaatggaacacaacttctacacccagaaagggtacgaactgaactgccatgacgacttgaccgcctctatggaagattatctggagatgatatgccggatgctccttgaaaaagatgtggtgcggatccaggaactctccgcgcagcttcacgtaaaaccgtcctccgcctccaagatggtcgggactttaaaagaaaaagggtacctccagtttgaaaaatacggatatctgaccgccacacaaaagggccgggaggccggcaattaccttctgtaccgccatgaagtgctgcatcgctttctctgccttttgaaccatacggaaaatgaactggaacaggtggaaaaaatcgaacactacatagataaaagaaccgtcgaaaacctggcccggctcctccccctactgccagaatcttaaaagtcccgaaaccatccgtcaaacggtctggttccgggactgctgttttccattctttacagagcgtccgttcataacgggcacccgcggactataataccttctgccactcctgctccttaaagcccggcagcgcaaaatcggccccgataaggagcggacgcttgacgagcattccgtctgtggcgagaatctcatactgctccttctcactcatctcgggaagtctgtcttttaatccgagttctttatacttcatcccgctcgtgttaaaaaaacgcttcagcaaaagaccgctccttttatgccactcttccagctcttctgccgtgggattgtcttcaatgatatgtctgtcctcaaatgcagcgccgttatcctcaagccatttcctggcttttttgcacgtcgttcattttggatattctaaaaatagtacacccatatcttatctccttttactttcttttcattttattgaaacaacggggtggaaaaataccgctcggccgtatcggccagcacggtcaccaccgtctttcctctgccgagcttctttgccatgcgcactgccgccgccacattcgtaccgctgctgatgccgcacatgagcccttcttttcctgcaagctcttttgccgtcttcagcgcctcttcatctgtcacgaccacgatatcgtcatagatcttctggttcagtatgtccggaatgacgccgtctccgattcccatctgaagatgtgttcccaccttcccgccggacagtatggctgcattttccggctcaacggcccatatctccatatcggggttctccgctctcagcgcctcacctatgccggtgatggtgccgccggttcctatcccggagcagaatccgtggatcggcttacctgcctgcctcagaatctcctgtcccgtctgctcccggtgggccgcgctgtttgcttcattttcaaactgctgcggcacgtacacgtcaggatcttcctccgccatcttaagcgccgtccgcagacactcgtcaatacagtcgcctatattgcccgcatcgtggatgagcctgacttcggcgccataattctgaaccagcttccttctctcttcactgacggaatccggcatgatgataaccgtcttatatcctttcactgcgccgatcagcgcaaggccgatgccctggttgccgctcgtcggctctacaatgaccgtatccttatggatcagaccttttttctccgccgtctcgatcatattaagcgccgttctcgtcttgaccgaaccgcctacatttaccgcctcaaactttacaagtatctccgcatccccggggccggtcatacggttcagacgaatgagcggcgtgttgcccaccgcttccaatacattgtcataaatcatctcttttgtcctttctaagtgtacttcttatatatacactatagactaaatctgattatgttacaagtaaaaggagcccctaccatctcatacactccgacatgacacagatgccggacgctccgaaagcactcatctctctcacgcacgtctctgtcccctgcatgccgcctatggcatacaccggcacattcaccgcctcacaaacaccctttagaaatccggtcccgcggggcaggactccccgtttacagtctgtagaaaacacatgcccggccgtcatataggccgccccaagcgcctctgcttccagcgcctcctgcaccgaatgcacggaagtaccggcccaccggaaccgaagcgccctgtcccggcatgatctgaaaagtggaagcggcagatgtaccgcacatgatcgaaggcgctctgccgcttccatatacgtatggggaatacagaacacatcatatgcgtcacagatgtcccgcacttcacagagcagccgttcatacgcctcttccgccagatctttttcccgcacgatcagagccagcggatgtctcaaacagatgcgttccacctgctccagataaggacggctgcacagatggcggtttgtcacggcaatgatgccgccccgggacatctccatattatcatgcatcgttcttcctccctctatacgtatacataatcctgcatcaccggctgcagcttctgtcccaacaggccgttgtacacttcttccacagagcgcatatctgagatctcaaactgtccgtctccttttgcctccgtatcccccacatgctcccctatcgctgtgctcacccccgcagagattttcgtcgccgcgatattgacgagatgatcccgcacgcgggcacattctctcgtggatatcgttatgcctgcaaacggcatgaacagacggtaagcgcacacggtctgcagcagctgcggttcgtgcacatccataggatcgatcttgtcattgttgataataggtctgagccgcggacaggaaaatgcgatctctgcatggggatactttctctggagcagatatgcatgcattccggtggcaaatgcatctttgcggaaatcgtccaggccgagcagcgccgcaaagccgacgcctctcatcccgcccctcagcgcccgctcctgggcgttcagccggtacgggaagatacgtttgtgcccggacagatgaagactttcatatttatcagaattgtatgtttcctgaaacaccgtcacataatctgcgccgcacttatgaaggtaagcatactcatccgaattcatcggatagacttccagaccgacgactttaaaatatttccgcgctgtcatgcaggctcctgcgatgtattccacatccgagtgttttctgctctccccggtgagtatgagcacctcccgcagtccgctgcgggcgaccgcttccatctctctttctatctcttcggcgctcagtatggcgcgcctgatcttgttatgacagttgaagccgcagtagatacagaagttctcacagtagttggcaatatacaccggcgtaaacatattgacgctgttgccgaaatgcttccttgtctctgtcctcgcgcactgtgccacctcctccagaagcggaagcgccgccggggacagaagcgccgcaaagtcttcaggagaacggttctcatgtcccagcgcgcggcgtacatcgtccgccgtatactttgtatagtcataggagttcatggcagccgtcacctgcgcctccacatcagacttaagaacctccatccccggcagatacgacatatgatcgatccggttctttttctgccattctctgatatcgtcattcaagatactctcatttacacatgtttgttcatccacaataatatgcctccttctaatcctgcagaaagcccgtaagcggagaagatgcgctggcccctctgtcaatgactctgcccatgccggacagatatgcagctcttcccgcctcgaccgctttacaaaatgcccctgccatggaaggaatatcgcccgccgttgcgatcgccgtgttggccatcacggcggcggcccccatctccatcgcctcacacgcctgagacggctttccgatccccgcgtctacgatgaccggaagatctatctcatcgatgagtatctgaataaagtctcttgtacagatccctttgttggaaccgataggagagccgagcggcatgatacaggccgcccccgctccggccatatccctggcggcattcagatccgggtacatgtaaggcatgacgacaaacccttccctggccagtatctccgtcgccttcactgtctcataattgtccggcagcagatatttggaatcgcggatcacctccaccttcacaaaatcaccgcagcccagctctctggagagccgggctatgcgcacagcctcttccgcatttctcgcacctgaagtatttggcagcagtgtgacatgttccggtatgtagtcgagtatattggccattcctccctcgtcagcccggcgcagcgccagcgtgatgatctgcgcgccggcatgctccaccgctgctttgataaggtccagggaatatttgcctgaaccgagaataaagcgtgacgtgaatgtatgtcctccaagtgtaaatgtatcctctgtcgtatgttccatcataacttcctcctactctatctgtccttcaataatatactgggtgatcaaatttgcctgatgcgcagcgcacagtgcggcccgcggggccatcagccccctgccgtatgacggctcactcaccccgtcgccgcacacataaaaacgctccgtcaccttccgggtccgtatggtgtcattgcctccccagcctgccattcccgatgcacatacaagaaacttgtccggataatgttccaggatcccgttgacaagcgccgccttcgcctccgggtcgtcaaaagcctcacacacaatgtcatcctgtgcaaacagggacaaaagattttcttccgtcactttgacgcattccgggcaaagttccaggtatgggttgatctccataagctcttccgtcagggcgcttgtcttgtacatgccgatatgccggataaaatactgctgccggttcagatttgtaatatccaccttgtcaaaatcaataagatgcagatgccccactccgattctgaccagggcaaacgcaacattggacccgagccctccaagaccggcgaccgcgacacgggcgccggcaagcttttgccggacctccggggagtggcgttctgccagcgcccgctggatctctttctccgtgatcatacactaacctcctcctacaaagctcacaacttcgatcgtatcaccgtcttcaagcaccgtctgcgcatactgtttccggggaacgaccgccccgttgcgctcgaccgctactttttgttccggatactccatctgtctgagcaaatgctccacagaagtacccggaacatattcctgccctctgccgttgaccttcatcatatgaccgcctcctttctgtcaccctcagataattgccgtataaataaagtagacaagtccatttcacctgcctatgtccctcactcatgagagacttgtacattttgagcgccaatgtgcggctgcgaagcagctttcctctgcacattatgtacattccccggagggtttttgttatataggaaagttctacgaacttgcctatataataaaaaagagttcatgaaagagatacacccgcggtggtgcaccccttcatgaactctcgtccactctcgatggtttgaaatggaaaacgggaaatgcctgagcatttcccgtaaacaaactagctgtacgttcctacgttggcattatccaaatcaggtatatgggtcgaagtttacaacttcctctcagcctatctcataagctcccctattcaatttacatctataaatataaggcatccggcgcattgtgtcaataccggatgatgatgtacgcactaacagacaggagccgctcctatccgctctcccatctttacgatcgtctcaaagccttttgccgtgttgtcgatgagacgtttatccaagtcggcggcccctttctggaacaatagaatgaccgtggaacctccgaactcaaaccgccccttttcctgtccgcgcttcaccttgcaggtgccgtgataattcgtgatgcgccccaccatcagggctcccacctccatcatgagcacggtcttaaaatgccggctcttgagcagggaatattctctcgtattttctttatagatcgggatcacgtcattcgccgcaggattgaccgtgtggaagatccccggtatggtccggttctctgatttttctccgtcgtctatatagcagtatctgtggtaatcgtccactgtcagccggaatacacaggcatacccgccttcataacgctttgccagacgtgcggagcgcagaagagattctaccgtatacttcgtattcttaatgcagaattcacctgccccgtctctgttatgtaagacaggatacacgctcagtttcccgtcgcacgggctgacaagtgtatcaggaccaccttccatgggacggaattttggttttatctgccttgtaaaaaaatcattgtaagatgtgaacttctgctttctgaagcaggacaaatctatgttgttgtgtttcacaaacggctttatgaggcatctcgaccagtttctctccagaaaccatcctccggcccttgaaattccgggacgtacaagcagccttagggcaactctcccggcgcggtgcgtatacatccacctgagcagtctgtcctggccagagtcgtccgacgtaactttgccttctctgtcaatatatttcatgtcatactcactttcatcttctgcagaaccacggccagcccgtgtggaagctgatacggtaattcgtgaaaatgatcattatgagcacagcggcgcccaccaccgccacgagaaccgccagcgtgccgttcttcggctttctcagcttaaagttgcctataaacaatatacctacgatcaaaagcgcaaggtgcaggcagatgcggaacacccagtccggcacaaaaaactgaaccataaacacaagaggaagcacgatcgccatggatgttatcggcagtcctctgtaatacttctctccgctttccgtcacgagggcgtttttcgcctccatcacattaaaataggcgagacggatcactgagtttatacagtacagtataataatggcaatgccgatggggcctcgcacaccgagcaggtaacatatcagcgccgggaacgcgccgaaacagacgacgtcgcagagagaatcgatctgtatgccaaatgccttctcatcgtccgttctgtcctttttcgtccgcgcgatcttaccgtcaaacatatcacataaaccagatatggccagacataagatggcagtcttaaatcttccgtggattgcctgtgtcattccgaatacagatgatgcaagactcacataagtcagcactaccgtataattatagattcctatcattttactctctctttcctttactcatattttatctgccgctttctgcccgatcgtaagatgagcgaacaaagtcatgcccgcgctgagcagaagctgtacataataagcgatccccctgcttaaaaccattccgggcagcagaagcccggctgtaaatatgcctttaaagatgatcaggaacagattttcactgattcccattcctcccggcagcggcagcatatcaaccgacaccgacacaactgcctgaagcatgactacatcatagatatgcgccccgttcaggccgaatgccttgtatacgaaccacgtgacaaagaacaaggcaaagcgctgcagaaatgtgatgataagcacatttactatcactcttccgtgggtgcgcagatacagtgccgtagcattgtactggtccatggactccgccagacgccgtgtgcgttccggcttgtgctttaatatgtgaatacgttccagtatctttaggaatttcatcatgatccactttgccagcgccgggtggaacgccagtatggacatggcgatacagcacagtacattcagcgcgactccaagatagaagattggaaggatcccctccagataccggtgcacaaaacctctttggaaaaatgccacaaacagtccgatcgcgacaagcaccgacttatatgttattgtaacaatcattaaaaccaatgtcgagaccggaaccggaattttattcttccgcatgtaataaatctgcattggctgccctccgcttgcggacggcgttatcgcactaaagaaaaatcccacgcatgaatagaggaaacaagtccatcttttcgtgcgtatcttcaatgtcccgaacatgtaatgtatgataatggattctccccatataaagatgatgacgccggcgatcccaggaagcagataccacggattgaccgtgataatggcccgcaggacggcgcgcaaatcctcgcctttaaacacactgtacaatgtcagcgcaaatactacaaggagaaataccatatttgctattttcttattcttgctccccacagttccccctcttttctacaggtcttctccttctttcaaaacacagacggtacagtctgtcaaataacttctttggagtacggtataactctgtgtgaaacgcgatccagtatgtgccttccgccacgaggatccctccgaccgcatccacaatataatgctgctttgtcacctgggtcgatacacagatcaaaatcgcaaacagacaggaaaacatccggtatgctttcgggacattcttctgtccacgtatgccgatataacaaaaccagctcaccagacagtgaaacgaaggaaaaagtctggtcggacggtctatctcatatatcatccgaagcagcattacccagagtccgtcaccggccagctctggtcttacattcgtcgtcggaagcagcagaaatatgaccgcacagacgatccgcgacatcatatccgctgtcacaaagcggtaacagtgctcttttccctgccttgctatcaggatatagttggcaatccagaacagataacagcccagataaatcaccacaaaccacggtatgacaggaaccatcccgtcaaaagggagtgtcaggtcatagtgtttccacgacctggtcagcacttctgtcccgttgtatgccataaagtttaccgtcacacaggcaagcagcggaaatatggcatatttaggcagtattggcttttttattctgcatctggttcccattccatttctcctttatcacagcctactgaacattatagcagacttctgaaaaattgcactctttattcccgcttctttaggaaatcctaataatttctttattttttataaaccagcctcccaaaatgctgacagaaaaaagctccccacccttacggatggagagcacatacacttatcatatgtcctgttatccctccattttctgtagttcctcataacggatcacctgctcctccgccttaccggtcactgtcaacggaggccgtggatcttcatctacaatgagaagcagacacccacaaggagaacaacagtcattcattaacgcgtggttgactgctaaaagttttaaatcctcgtttccacaaggggaacgacggcaaactctgtcagtacgaaccaagccatttgtgagtttcaatcctcgtccccacaaggggaacgaccggcgggaagctggaaatcaaagatcgccggtatgtttcaatccacgttcccacaaagggaacgaccgctgtatcaatggctttctgtactctacggtcgtttcaatccacgttcccacaaggggaacaactttctgttctgcataggatgtttatgtttgtatttgtttcaatccacgttcccacaaggggaacgacaggttgggtatggatttcctaccggaacgtacgcgtttcaatccacgttcccacaaggggaacgacgtcatcaagacggtggccggaatggccatggcggtttcaatccacgttcccacaaggggaacgacagcaaatatatccaattcccagcacaaaaatacaaagctttttgtactacactacgaatttctttagatatataatcatatttatcttatagtctaatacgcctgattgttttgtgcaacttttttggtgcgaatctcctgggaattttatgttcacttcacattcgcactacagactcggaatctcatatacagcacttctctcatctatcagcccatacacgttatgcctctgtcttaatacttattacccagacagcatagcaccttcaatcccggtcacgctcattatacctctgaagcactgcaggccttcatcagatacattggggcagacagccctccccttcataattctgaatgatatttacttaattatatcattattacagaatgaacagttaattatttttgccacaaaaaagccgccactccttaataaaaagaactggcggctttcaatatgattcttattctattgactatgcattcttggctgtgatagctgcctgtgctgccgctaatcttgcgatcggcacacggaatggtgagcaggatacatagttgaggcctaacttgttgcagaattctacagaagatgggtctccgccgtgctcgccgcagataccgacatgaagtttatcatttgccggtcttcccttggcaatagccatttccataagctggcctacgcctgtctgatccagtttggcaaacggatcgttctcaaagatcttagcgtcatagtatgcatcgaggaacttacctgcatcatcacgtgagaatccgaatgtcatctgtgtcaggtcgtttgtaccgaaacagaagaagtcagcttcttttgcaatatcgtctgctgtcaggcaagctctaggaatctcgatcatcgtaccaacttcgtacttgaggtcgcttcctgctgcagcgatttctgcgtctgctgtctcaacaacgatcttcttaacatatttgaattctttgatatcgccgatcagcggaatcatgatctccgggcaaacgctccagtcagcgtgtgctttctgtacattgatcgctgcgcggataaccgcttttgtctgcatctttgcaatctccggataggtaactgcaagacggcatccacggtgtcccatcatcgggttgaactcatggagagaatcgatgatcgtcttgatctgatctactgttttgccctgagcgtccgcaagtttcttgatgtcttcttcctctgtcggaacgaactcatgaagcggcgggtctaagaaacggatcgtgaccggatttccttccagtgcttcaaacagtccttcaaagtctccctgctgtaccggaaggatcttctcaagcgctgcttctctttcctctactgtgtcggaacagatcatctcacggaatgcatcgatcctgtcgccttcaaagaacatatgctctgtacggcacagcccgataccttctgctccgagctcgcgtgcttttcttgcatctccaggtgtgtcggcattggtacgaaccttcattgttctgtacttgtcagcccatcccatgatccttccgaattcacctgcgatcgtagcgtcaactgtaggaatcaggccatcgtagatgttacctgtagaaccgtcgagggagagcgcatctccttcgtggaactcttttcctgccagtgtaaatttcttgtttgcctcatccatagcgatatcgccgcatccggatacacagcatgtacccattccacgcgcaacaacggctgcgtgtgatgtcataccgccgcggactgtcaggattccctgtgcagccttcataccttcaatatcttccggagatgtctcaaggcggacaaggatcactttctctcctcttgcagcccagttcttcgcatcgtcagctgtaaatacaactttaccgcatgcagctcctggagacgcgccgagtgctttgccgatcggtgtcgcagccttgatcgcagcaacgtcaaactgaggatgaagtaatgtatctaagtttctcgggtcgatcatggcaacggctttttcttctgtgatcatgccttcgtcaacaaggtcgcaggcgatcttcagagcagcctgagctgtcctcttaccattacgtgtctgcagcatgtagagcttcttatcttcgatagtgaactccatgtcctgcatatccctgtagtggtcttcaagcttatggcagattccaacgaactggtcgtatacttccggcataacttcctgtaactggtcgatcttctgaggtgtacgtacaccggcaacaacgtcctcgccctgtgcgttcataaggaactcgcccatgagcttcttctcgcctgtagccggatcacgtgtaaatgcaacacctgttcctgatgtatcacccatgttaccgaaagccatcatctgtacgttgacagctgttccccatgagtaagggatatcgttgtcacgacggtatacgttggctcttgggttgtcccatgaacggaatacagctttgatggctcccatcagctgctccttcgggtctgtcgggaagtcctgtccgattttttctttgtattcatctttgaactgctcagcaagcacctgtaaatcttctgctgtgaggtcaacgtcctgagtaacgcctttttcctctttcatcttgtcgataagctcttcaaagtatttcttaccaacttccataactacgtcagagtacatctggatgaatcttctgtagcagtcccatgcccaacgcgggtttcctgatttattagccagtacttcaacaacttcttcgttaagaccaaggttgaggatcgtgtccatcatacctggcatggaagctcttgctcctgaacgtactgatacgagaagcggattctctttgtctccgaatttcttgcctgtaatctcttccatcttcgtgatggattccatgatctgtgccatgatttcgtcattgatcttttccccgtcctcatagtactgggtacaagcttctgttgtgatcgtaaagccctgtggcactggaagacctaaatttgtcatctcagcaagattagagccttttccacccagaaggttcctcatggtcgcgttaccttctgtaaacatataaacccattttgccattttcatgacctcctaaactaattttactttctaagtcgcacataatattgtactgtttttgacagggttcgtcaaccccttaaaccctaagaaatcaaaaaaacaggggccttgggcactcccattcacaattgccggaaacggcatttatcatgtcactttttgttgcagcaagagaataaatcatgtataatataaaagcatttctgcataatttgcataaaacgtaaaagacaggcagaggcctgcagcatttaacagagaaattgagaggaaaaggatatgaacgtaggaatattaaaagatatcaagacgggtgagaaccgggtcatcgctactcctgtggaagtggcaggactggccgcggacggtcaccgggtctatgtccagaaaggcgccggagcgaaagcgggctttccggatgaaaaatatgccgctgaaggagctgtcctgacagataccgcagaggagatctacaaaagctgtgactttatcgccaaagtaaaagagtttgaaccttccgaatacggacttctccgggaaaaccagatcgtctttacatgtatccatccggccgcacatccggaggaggtgcaggcgctgcttaagaagaaggtcatcgcattcaccgcggaggactcacaccggttcgggtctcccaactgcgaggccgccggcaaacagggcgcccttatgggactggaatccatgctcacgatcaacggaggcaaaggtaagtttgtcagcggccttggcggcgcgccgggcatgaagatacttatcttaggcgggggaacagttgggcaggctgccctcagcgtactgcacgcgctcggcgcctgggtgaccgtggcggacatcagcatcggaacgctgcgccgcctccagaacgaatacaggcagagtattgatacggtcatctcaagccgtgaaaatatcaaagcgcttctgccttctgtggatatggtgctcaactgcgtaaaatggccgaagggcaacacagagtatcttatcacgagggaaatggtacgctcgatggaaccgggatctgtcatcgttgatatcagcaatgacgaacagggcgcgctcgagaccttccacgagacgacgcatgagaatccgcgttatgtggaggaaggtgttgtccactactgcgtgagtaacatcccgggagcgatcgccaactctacttctgtagcctacgccgcatccgtactgccgcatttccgcagcatactgaataacggcgtggcagaggcctgcgcaagagacggctatctcagaagaagcctgaccacctataaagggtatctgacacacgaggagacgagcgcgctgcagaaacgcccgtggatacgtccggaggaaatcctgggaatcgccggcagggaactggactttgcgccgcctgccacagtcagccggtcggataattttataaagttaacgtaatagaaggaactaaagagaagggggattttaattctatatggaaacaatgggatttatttcaatcataccggcaatacttgctatcgtattgtctttcgcaacgagaaacacagttatatcacttgccatcgcgtgtatcaccggaacgctgctggcaggccagggtgtcttcggattcccgacacttttaaaagaaagtctcggaactacaagcttttcgtgggtaatgctcttgaacacttttatcggtattctcgtagcctatttccagaagacgggcgcgatccagggattttcccagaaagtgcacgaccgcaatttaagccgcagaggcgcacagctgatggcgtgggtgctcgggatctttatctatttcagtgattcattcagcccgctctttgtcggctctgtaatgagaagcataacggacaaggccaaagtatcccgtgaaaaacttgcctacatcgcagactccacgtctgcacctgtcagtgtgctcatgccgatcacaggatgggccgcttacctcatggggcttgccgtcggcgtcggatgtatcgtggatgaaaaagatgcgtccgcactcttcttaaaggcaataccgtttaacttctatccgatattcgcggtgatctttgtcggtgtgatcgcttccggcatcatcaaagatttcggaccgatgaaaaaggctgaaaagcgtgcggttgaagaaggtaaagtgatccgcgacggcgcgacgccgcttatcggaaaagaactcacagagatgcaggcgtatccgggtctgaagccgcgggtgttcctgaacttcattttcccggttctcatgatcatcagcatcgctatcggcacctacatagccttcagttctgcaaagacgatggaagcctttttgatggtcgttctctttatgaccgtgagcatgatgatacagggcattccatttaaggaggtcatgaatactctgacagacggcgtaaaaggcgcgctgcctgcagtcatgctgctggctctcgcctattcggtcaacgcgctgagctcacagatgggtacggcaaattatatcatctccctgacggaggacctgcttaccccgcacatgctgccggctatcatcttcctcgtgtccgctgtcatggcatttgcgaccggttcctcctggggaacttttgcgatctgtatgcctatagcgcttccgctggcgttcagctttacagacggcacgctcactctgctcgtgatcgcaagctttgctgccgttgcaggcggcggagtgttcggtgatcactgctctcctctgtccgatacgacggtactttcgtccaccggagcagcggccgaccacatcgaccacgtcaagacacagctgccctacgcactcgtgtgcggcggtcttgcactcattgcttatctgatcgtaggatttgtgtttgtgtagaagtttacagatcaaatatgagaagcgcccggactgctgaaagactgcagtccgggcgcttctcatatttgacgttcctacatttcttctataaatgctttatatcctttataagcttcatatacatccgccttgctcgtgatctcccacggcgcgtgcatacacagtaccgccacgccgctgtctatcacttccatcccgtaatttgccataatatacgcgatcgttccgccgcctccggcgtccactttgcccagttccgcaaactggtacgcaacatgtttccggtccattgccctgcggatctccgccagatattccgcattcgcatcgttggaaccgcttttccccctgcttccggtaaatttgttgaatacaaggccttttccgaagaacgcagagcttctcttttcaaaagtctctgcaaacatcgggtcaaatgccgcgcttacatctgacgacagcatcttcgagttctgaagcgcgcgtcttactctcagatcggaagatccgccggtcagcgcggtcatctccgccacaacattttcaaaaaatctggagtgcatgcctgtcgcgcctacgcttccgatctcttccttatcaacaagtatacagcacgccgtcttctctactttgtccacatcaagcaacgcaaacagggaggtaaaggcacatacgcggtcatcctggccatatgccatgatcatgctccggtcgatgccgcagtcccttgcatttcccgccggaacgatctccagctctgcggagacaaaatcttcttcggaaataccgtatgtcgtttccaatatgcgcagcacatttgccttcaccgcatctttttcttctttttccagactgttgtcactgttgagcgggcggctcgcaaagagaaggtccagcttctccccctcgatgacggcgttcgccttcttttccatctgcttggacgccaggtgcacgagcaggtcggtcaccgcgaataccgggtcttcttctttatcgccgatatggatctcaacgagagaaccgtccgtcttggccacaacaccgtgaagcgcaagcggaagcgttacccactgatacttcttgatgccgccgtaatagtgggtatccagataagacagctcttcattttcatataatggattctgttttacgtcgatccgcggagaatcgatgtgggcgccgagaatattcattcctttttccagcggctccgtaccaatatgaaaagccgcgatgctctttcccatgcatacggcgtaaactttatctcctgcgcccaaagttttctgcccgtctataaattctttcagatcccggtagccgtgttctctgagcatctttaccgccagcttcacgcattcgcgctccgttttcccctcatccagacagcttttgtaagaccggttgatctgttccagttctacacattcctccgcgctgtatgtcttccatgtattatccttttccattgtaaaacactcctttcccttgctgccttaacataaatactgcaatgccggcgcacaatatgttaacgtatttgactgctgtctaatacaataccatattatagcatctccgtctccggcaattctatacttttttagaataccgcagttcttttaaattatggctccacaatgtgaaagaagaagtcgaactttaccatatgctctgtcagcttctccagcacatccgggtctccttctacccggatcacgctcttctgctgctctttatcgtcattgagtatcgcaaacattccaagccgcggcagtgtcagggtcgcgtctgcatccggatccccggcatttttctggtacaagactacgcccgactccaccgtgagaagataaggagcctcatctgtaaagttcagattgatcctgaggttcacatcctgcgccttgttggcatccagcagaataccgagataatctagcatcatctccggtgtcatggacttcatgaggtcagggcttacgttggcctttatatccggatcagccacggtcccctccctgagttcctttgctccggaaaggaaggcattccgccacgtcccggattcagcctgatagccgagctgttccagggcatctgcgcagaggctgcgcgctctttcattatccggctcggcaaatacgatcatgttggtgatctctgccacccactgatactcccccttttcataatcttcctctgccttttgaagcaccgcatcggcatcgccaagatattccatatacttttttgcccggtctgtgggcgccagcctgttcagattcaccggatttgcgtcataccagcccatataacgctggtatacggctttggaattgtgcgctaccgtgccgtaatactggcgggtataccagtttttttccagacgttccggaagtgttatcatgttggcgatctcatcggatgtatacccttcattgatgtacatcaatgtctggtcattgataaacttatacatggccgccgtatctttcatatagtttctgatcacgccgttcccccagtggggccagttgtgcgcctgaaatacgacatctgcttcctccccgtacagggtgaccgcttccataatgtattctgcccatgcatttccgtcccgcacctgtgccccgcgcagcgtgtatagattgtgcagggtgcctgtgcagttctctgccatccagagcgcttttttctgcggaaaccatgtattcatctccgccggcgcctctgtcccgggcgtcatctggaattccatctccacaccgtctatggtccgtctgtctccggtcgcttttataatatcattgggcgggatataagatatggttcctgtggactgtcccatcccgatcccgatcgccatcgcccccgtctcactgctttcaagcatcgttccgtactggtatccggcccgcctgcccatagcattgccggcatatacattttcactgaccgcatgttcttcaaatccatccggagcaatgaccggtatgcgtctctcagccacttcttcctcagagataattcctttgatgcctccatagtggtccacatgaggatggctcatcacgatgcccacaacaggacgctctcccagttcttcgttcacaagctccagtgcagccttggaacactctgtactgatcagaggatcaaacacgatccagcctgtctccccctgtataaatgtaatattcgtcatatcatatccccggacctggtagatgccgtccgtcacttcaaaaagaccgtagagatggttcatctgggtgctgcgccacagacttggatttacggtgtccggcgcctccctgtcttccagaaaggaatatgccttctggctccataccgtcttgccgttttcatctttgatctccagctctgccggtgccgcgagcaggttctttttcgcgaattccatctcctgcttatcatcaaagtccagaagatcgtacacttcctcgttatttttctttgtcatgccggtcgctttttttgacttttttggtggtcccccgtccttaccgccgcttccgtcattgcccggcgctgctgcacatgctgccagacttaccacgcaggctgtcgtcaatatgcaggaccagattttcttgtatttcataacttgacctccttctttcccgcccgacatcgccccggacagttctgcaccgcgccggaaccaatgcggatcagtttgaactcgatatttaatctattaattgtactatttaaaatacagatacgatattatacggtattagatttgtacagcttttttacacagacccactgaggcaaacgctccgtcttccgcccggtcacctgatttctccccaaatcaggccaaaatacctcatacagtattagaaaaagtatcctcaaagtgtaaaatatgatatactgtatgcaaaacgcagtgtaccgaagcgtcaatacatccaggaggaagtcagcatgacaggacaggaaacacccgtatttctaaacgataaattcacccctaatctgctgccggaggtgtgcgcccccagacaggcacttttaaaaaaatatatgcatgccgcacagttccgctttatctatgtcggagcccaggccggaagcggtaagaccgtctcttcgcttctctggctcaattcgtgtgaacgcaggacgatctggatcgggctcgactcctatgacaatgccccgtccgtattttacaagcagctggcaaccgggctttattctctgcagccggataacaatgccatgcgcgcggtgctggtggacccggatttttctgcctcccctgtggagcatacgatccagctcatcgccgagatggaaccacaggagggggcatttgcgctcgtcctggacgatctgcatcttattaccaacgcagagatcatcaaatcactgcctgctgttataaaacgcctgccttttagttttattacgcttattctctcccggcatatcattccggatgaattctctacgcttgtcagagatccgcagtcacagatcatcacttccaggcagcttcggttcacagaggctgagatcctgcggtattttgagagcctgggacgtactctcacggcagaagaagccaattttgtctatctggccacggacggctgggcgatcgggatcaatgccatggccaaatcaggacagcttcaggacgaaggggaaggatatgactttgcccgctatttcaagacgcagctctgggacaaatgggagcaggaccttcgagacttctgtcttgccactgcggtggtggacgagtttgacccggaactggcaaatgtattgtcgggcagagaggacgctgcatctgtcatggaacacttaagccgcaccaactcctttttgagccttcttcatgggaatacctaccgttaccaccatctgtttcaggattttctacgggaacggcttgtacaggaacgtgtagatgtgggaagactttataaaaccgccgcgctttattaccgggatcacagcgattatacgagagctctgaaattttctctggacagcggagattttaagaatatagacacatatctttacttgttcttatttgagaatcaccggggatctgtggctgactatgctgaatttctccgcccgttttttgaaaaagactttccgagacatgcatacagagaatctcctgttctgcacgtcctgagcgcctggtattattatctcaccagcaggcaccgggaatttgcggagcatatggatgctattatgcttcatcttccaaagatcgcaaagaccggctctactttcgtagagttttccatgctcgctttcagtgtggattaccggacaacgatacacaaaaaaatcaagcagttctccatgttcggccgctttgtaaaaaaatatacgcctgagggacttgcaacttctatcgcgtcgtttacccacaatctgccctacatgcaccgcagtaattttgattattcggatcttgccctgcctccggatgttctggatgatatcgaccataccttcgcgcctcttctgggcgcagaatgggtctatatcaagccaggcatacgcacctgctttctctacgaacagaaccgtatggaggaggcggcccggatgctcaggacgacactggactgtctgtcagacaaaaacaagacagaggggcgtatctgcgtgatcgttctgcagcacagcatcttatggcagactggaaacaggaaagaggcagacactgttttaaccggcctctccaatcttgtggcaacggaggcgcagttttttgtgcctaatttaaaagcatacacggcaaagctggctcttctggatggaaatgcggctgctgccagagaatggcttgacaattattttgtcgttgacatggagcatgtggaattgttccgggcctttcagcattttacgacggcgcgcgcctacataacgctcggtgaatttgcagaggcgagaagatatctgctccttttgagagaatatggtgaaaatctgaaccgtccgctggacgcggcggaggcaggtgttctgctttctgtcctcgactggatcgaaggaaataaaaaagaagccgcccgtaccctgcttgcggtgctcgaagatatgcagccctatgaatttataaggatcatcgccgacgaaggggccgccgtactaccgatccttaagaaagctgctgcccttatggaaaaggaagactaccgcggaccgcttaaaaggcagtttatgagtgaagtccttctggcggcacacgccatgtccaagtgccacaaaggcattgccgcgcagttagacagcagacgcccggtaaagctgtcaaaacaacagacactgatgctctcccttctgtcacagggatataagaatgcagaaatctccgacattacagggcttgcaatacctacgatcaaatcccacacttctatcgcctatcacaaactgggggtaaataacgctcttgacgcggtgcttaaggcgagagaactcggattcatagactgaaaaataatacaggctgcagtccttatataaaagactgcagcctgtattgtctgcctgatctgttcttatttcagtcccatttcacttctgacttctttaaagcattttacgataaaatcgatatcttcttttgtatggcttgcacatacctgtgtacggatccttgctttccccttcggcactaccgggaatgagaatgctactacatatacgcctttgtccatcatacgctttgcaaattctgcggccgtcttctcatcatacagcatgacaggcacacaaggatgtgttcccggaatgatatcaaagccattgtccaccagttctttgcggtagtaagccgtgacatcttccagatggtcacgcagttctgtactttcatccagcatgtcgaacagttcgatgcttgctcctgcgatcgccggagccaatgagttggagaataagtacgggcggcttctctggcggagcagatcaatgatctctctgcggcctgatgtgtatccgccggaagctcctccgagcgcttttccaagcgttccggtaatgatgtcgacacggccctgcactccgcagtgttccggagttccgcggcctgtctttccgacaaaacctacggcgtggctgtcatcgaccatcacgagagcattatatttgtcggcaagatcacatacgccctttaagttgcagataatgccgtccattgagaacacgccgtctgtagcaatcagtttcacgcgggcgccggcctcatccgcctcttttaattttgcttccagatcttccatatcattgttcttataacggaaacgctttgccttacagagacgcactccgtcgatgatagaagcatggttcagctcgtcactgatgaccgcgtcgtcggctgtgagaagtgtctcgaacagtccgccattggcatcgaagcaggaggaatacagtatcgtatcatccgttccgaggaaatcagagatcttcttttccagcttcttatgtatatcctgcgtaccacagataaaacgtaccgaagcaacgccgtatcctttatcgtcatatgtctttttggccgcctctataagacgcgggctgttcccaagtccgaggtagttgttcgcgcacatacagagaagttctcttccgtcctccattgttactctggaaccctgtggggaaacaaacggcgcctctcctttaaaaagtcccgcctcttttattccttccacttcttttgtgtaaatacttaaaatatcgtctttacgtgccattggtatcaatccttctttctttataatttaatcattcacatgtgcccagtctaagatcactttccctgactggccggagatcattgcctcgaagcccttttcatagtctttgatatcaaaatgatgtgttatgatatcagagatatcgagtcctgcctgaagcatggtagacatcttgtaccatgtatcccacacttttcttccgtaaatgccgcgaagattcaggccgttgaatataactgtctcaaggtctactacagcgtcagttctctggagtccgagaagcgcgatctttccgccgtgcttcatgttgtggatcatatcggaaagtcccggctggcttcctgacatctcgagtcctacatcaaacccttccgtcatgccgatctctttcattacatctgttagtttttcttcttttaaattgacgactctggtcgcgccaagcttcttggcaagatccaggcggtattgattcaggtctgtaacgacaacgtgccgtgcgcctgaaaactttacaatggctgccgccatgattcctatcggtcctgctcctgtaatgaggacatcttctccgagcacatcataagagagcgctgtgtgcgtagcgtttccaaacggatcgaatatcgcgtacatctcttccggtatcgccggattacacggccatacgttagatgacgggatcacgagatattcggcgaacgctccgtttctgttgacgccgacgccttttgcgtctttacagttttctttatggccttccagacaattgcggcattttccgcatgtgatatggccttcaccggatacaaggtctccgatatggaagccctgaacgccgcctcccacttctacgacttctccgacatattcatgccctgccgtaagtcctaccggtatcgtatgctgtgcccagtcgttccactgataaatatgtacatctgtcccgcagatagctgttttatgaatcttgatctttacgtcgtttggtccgacttccggaaccgggactctcttcatccacaagccttcttctggtttctctttcacgagcgcccacatcattccgtcgtttttaatatctcccatgtttaaaacctcccaatcttattaccgccatccccagacggttattttcgagttaattatatcattcattttatccatatacaatgatgtattccaagtttttttatacgatttacttcattttttgcacaataagtaaattggctatgttattatttacaaatcgcgtcagttaaattataatttatatagcattattcacaactatatgagataatagtctcacgttggggaaaacgaaactaaaagaaagagaggaaagcagatataacatgtaacaatatatctgcgaaatgagaaacatgaaaaacattattaacaaatggaacagtatcagtcttgtactcaggatcatctgtggattgattcttggtattatccttggcctggcagttccgcaggcgtcaggaatttctatcctgggccagttattcgtaggagcactgaagggcgttgcgccgatcctggtattcttcctcgttatgagtgctttgtgccgcatgggaaagggccagaagacaaacatgaaatttattgtcgttctgtatcttctcggcaaccttttatccgcacttgtagccgtactggcaagctatgtggctcctatcacactgacgcttaccgaagctgccgaaagtgacgtcgcacctccaagcggagttatcgaagtattgacaaatctgcttatgaacgttgtggcaaacccggtcgactctatcgtcaatgcgaactacattggtattcttgcatgggcagttattttcggtattgctctcaagaaggcaagcgaaggtacaaagacagctctcgacaatatttccgaggctgttgcgcaggctgttaaatggatcatcagctgtgcgccatttggtatcatgggccttatttttgcaacgatctccacagagggattgggcgctctgcttacatacggaagactgatcatggtactggtaggttctatggcatttgtcgcgctggttatgaatccgcttatcgtattcctctgcacaaagacaaatccgtacccgcttgtattcaaatgcctttcaagaagctttatcaccgcgttctttacaagaagttccgccgcaaatattcctgtaaatatggaactttgtgaagatatgggactggatgaagatacttattctatttccattcctcttggagcaacgatcaacatggccggagctgctattactatttcaacaatggcgctggctgccgcacatacaatggggatatctgtagatttcccgaccgctttcatcctttgtgtattatctgcactgagtgctgccggcgcatccggtgttgcaggcggttctcttctcctgatccctatggcctgcagcttatttggtatctccaatgacgtggcaatgcaggtcgttggtgttggtttcatcgtaggcgttattcaggattcctgcgagacaggcctgaactcttctactgacgttctctatactgcatgtgctgaactgagggacagaagaaaacacccggaaaactacacgaccgatatcaatattcatgcaaaaaagagaaaagctgaagcgtaaaagtaaaagctgaagtacaaaagaatatttttataaagaaaccggcatacagcgcatgtatgccggtttcttactgttatcattcctcagccgagatatgcgatggcttcttctcttgtcagccagatatgtatccctcccgccgaatccagaaaacggtcaggattaaaattttctgcatagaccatctcacccgctcggtatacgaagttctcatccacgtatgcatgtgcctctttatagctttcatgataatccacacttttgatcgtcaggactttcgccttgtcacatttcacttcattcgtcgtgccggagatccttcttgcatcttccggtacgagaagctggacgatacgtctgccaaagcagaccttccatccgataaaaggccctttttcggggcagtataagtgaaaatacttcgttttatcatctgttttaacatctgtcagatctgcgtgctccagagcggacgcaaacatatctgccccgcggatatccgcaccagtcatatcacacccgcgcaggtctgccgaatgcaggtatgcgcccgacagatcagtccctctgagcgaagaaccgccgaaaaatgcattgtcagccttcaaatatgccatatttgccttatccaggttcacattccgtatatcgcttttattaaaattaatgttatgtagatcccagcccgacagatccatatcctccaggagcgactcatgcagatcaagctgctcccccggtctccggtcttttattatgttcaaaagctctccctctgttatcttccgaagcatgttttcaccctccgtccttctctgtgatgcaagatacataaagcccccttctgcctcgttcacgatccggcaaaaggggactgacctacagtatcgttattttatttctaccactcaaactttttcgcaaagtaagattccagttcttcgatctttactctctcctgctccattgtgtctctgtcacgtactgttaccgcgccgtcttcctcagattcaaaatcatatgtcacgcagaacggcgtgccgatctcatcctggcggcggtaacgtttgccgatgtttccgcggtcatcaaactcacagttatatttcctgctgagctgcgcatacaccttttctgcgccttcgtttaacttcttagacagtggaagaacaccaacctttattggagcgagcgccggatggaaatggaggacggtcctcatgtctccgccttccagctcttcctcgtcatatgcgctgcacaggaacgcgagcaccatgcggtccgcgccgagtgaaggttcgatgacatatggaatgtacttctctttcttctcatcatcaaaatagctcatatcctgtttggacacattctggtgctgggtcaggtcatagttggtacggtctgcaacgccccacagttcaccccagccaaacgggaagaggtattctatgtctgtagtcgcattgctgtaatgactcagttcttccggagaatgatcgcggtagcgcacttcatcgtcttttaatcccaatgtctccagccagttcaggcagaacttcttccagtaattaaaccattcaagatccgtgcctggctcgcagaagaattccagttccatctgctcaaactctcttgtgcggaatgtaaagttaccaggcgtgatctcatttcggaaggacttgccaacctggcagattccaaacgggatcttctttctggaggtacgctgtacattcttaaagtttacaaagattccctgtgcggtctccggacgaagatatacgacactcttggcatcttccgtaacaccctggaatgtcttgaacatcagattgaactcacggatctctgtaaagttgtgtttcccgcaagtcggacatggaacttcatgttctttgatgtaggcttccatctgttcatggctccatccgtcaatgctgtcaccaatatcaaggccattggcatgcgcgaaatcttctatcatcttgtctgcacggaaacgctcatggcactccttacagtccatcaaaggatcgctgaagcctccgagatgtccgctggccacccatgtctgcggattcatcagaatcgcgcagtccacccctacattgtacggagactcctgaacgaatttctgccaccatgctcttttaacattattttttaattctacaccgagatttccatagtcccatgtatttgcaagcccgccgtaaatctcagaccccgggtatacgaatcctcttgatttcgccaatgccacaatcttatccattgttttttctaccatatcctcatcctcgccttctataagtttcataattgttaattattatacagttaaccaacggcgttttcaagccctatcgcacaattgtttccagtatttccagtgatttgaagcgtttttccacataaacatccaaatatgcgcggacaattttcccaagctgctccagtacctcctctttaaccgcaaaggtgtacagtttttcaaccggggagcttatgatgtactgcatcgcataaagcgtggaagcaagcagctgtacgccgtcaccggcagtcttctggcattcgctgcacacaagcccgccttttgacacgctgaacaccgcggggcgctctttgtctgcgcagcgcacacattcaaatacctggggcgcctccccgtttacggccactgctttcagttcaaatatgtaccggacgagccggttgtcaaggtgcgggtttgtcagcgcgcgcagtgtctgatataaaagctttaggagaagtgtctcgtcgctgttctctcttgcataataaccggcaaaatccagaaaataaaagccgtaatacgctccctccacgtccacccgcagctctgagaaataattagaaacagaggctgacaccagcgtatatgatgtccgcccctcgtataccgtaaactcaccgaaggtaaacgggcttgtgacacccacaagcgcactgtggggctttcttgccccccgcgcaaatgcagatatctttccccgttccttcgtcaggatcacgacccgcctgtcatattcacctataggagatgcgtgaagcaccatgcctgtcaccgtaatctgattcactgattcttccacctgtctgtcttacgccgcatgtcccgtccgtaggagccgtatcggcctcacaacggtccattacgtggcggcagatatccatccctttataataaagataatctgtcaccattcctgtcctggtaaatttgtcccagtatctgtcttccatggaatcacctcatcttccgttttataagcttaggttctcccatggcagtgtctttttattcgtcttctctgtatccaaaatttttcatgagaaactcactgtcccgccagtcttttttaacttttacccacagtttaaggtttacctgacatccgagcattttttctatttcaaacctggccgtgctcccgatctttttcaacatattcccttgttttccaattattatccccttgtgggaatcacgctcacatattatagtggcatctatatgcattacttttctgtttcttttcatgctgtcgaccgccaccgcgatgccgtggggaatctcctcattcaggctgtggagcgccttctcacgtatgagttccgccacgatctgccgttccggctggtctgtgacagtgtcctcatcatagaactgcggcccgtaaggcaggtatttcatgacaaccgacataagctcatccgtgttatccccgtttctcgccgataccggcactatctccgcaaaatcatagatatctttataagcggaaatggcctccaggatctcttctttttttaccatatccaccttgtttatgacaagaatgaccggtgtgtttacctttttgagctgctccgcgatatgtctctctccggctccgataaaagtgctcggctctacgagccacagcacgacatccacctcattgagcgtgcgctcagctatatttaccatatactctccgagcttgttctttgccttgtggatccccggtgtgtcgacaaacacgatctgcccgtcctgaagcgtcagcaccgtctggatccggttgcgcgtcgtctgtggtttattggacgttatcgctatcttctgtccgataagatgattcataagcgttgacttccctacattcgggcggccgatcagtgtgacaaaacctgatttaaaatcctttttcatacgttctcctttttcatccgggacatgtttctttgtcattggggacgtgtactttttaattttcccccgtcccctgctgccgttactatgtcccctgtcagaaacttgtgactgtttcaaacagttctctgttctcctctatcatttcttcgctgccgataacgcagagctgatctgccttcagcacagcttccacgacgcggtacagggcacggatatcaccctgtgtggcgtccaggatctgattgcgttcttcccgtatcatatctgcgctgactttattcatatacaggctcatggagcggtctccctttgcggcaggcgtcataggctgatccagattgctcatcgtgccgatgatatatttcgtcatatcccgctcgctgacagtaaagttcttcagatattcaacgaccccttcatacacttctatcgtccgcttcagatttgggtcgcggtaggacacaaagtatccctccccgatacggttaaagttgctcatacatccgtatgcgccgcccttgacacgaatattctgccagagatattcgtagcttaagatgaccttcaatatctgcagcgctccggtgtaggaggcgccattatcaataaagttgcctgtgcgcgccacatactgcactttggacgcggtcttgaagccttcattcttcttctcacagtgaaggacgcacggcgtctcatccggagtctctttaaagagtctctgcttcaatcccgcggccagactctccatcccttcaagcccctcccgcgaagctgtgtagctgaacatcatattatccggccggaacagctgtcctgcaagatgctgtaaatgctctgcaagcatgtctttgctttcctcaaaatgctcctcgatatcggcgatctttctgtaaaactcaataccgtttgtcatatctttaaatctggcggacggagatccgtatgacatggcccgaagcgccgccgtcagatgcccggcagactggaaccgcatgagcagccgtgattttgccatagcaaggatctctttgatccgcttcgtgtcggaaagctttgatgcggtcagaatctctcccatcatatcaaacgccaccggaagctttccgtacaatgcttttgctttgatctccagcgttgccttgaacgctttgcttcgcacatccgtgacatcggagtaaagctccagcgtagttccgatgccgcctgtatgcatattgatctcattaaacaattctccgtagtcataatgttccgtatcgatgatgccgagcacagactgaaggatcccgacatacggaagctcttccgccggcacgccggacagatcgaacagaatatccacataaccgatgccgtttgtctctatttcgtgaaaaaccgcagggatacctgcaaatgtcatctcttcatttaatatcggctcgatatcgcgggagatatcttcccgcttcagtacgggaatacggtttaagtcttcctcactgtcttcttctgactggtacgcttccagccttctcgtccgttctgccagctcctccacttcttcccggctcaggctgttcttatactgcttaagcttacactccagttcctgctccatcctggcggtacgtcctttttccggttccacgatcacaacagcaccatgggtattgtcgagcagatatttctggacaagatcctcataataccttgtcccgacctgttttttcaggaactcaaatgtctcaagcgcctcaatgtggataaacggcctggagtcatcataaagccagctgtccagcatctgcagcccgtacataaggcctttcggataatttccaaaatcagcctcacggtagcggaattcatgataattgatccctgcctccagagccttcgtatcaagccccttctctacaatacgggcgagcacatcctcgatcactccaataaacgcttccttctgttctgtattggcgttctttgcgatcacagagaaaatcggctggtagattccattgtcataggaccccataatatccttgccgatccccgcatcggtcagttctttcttaagcggcgctccgggggctgacagcagtgcgtagtccagtatctgaaaggccagatacagttcccggtccaggcttgtgcctatgactttattataggacagatacgtattgtcctcctggggctcgtcactggctatggagtacgggatcgtcacttccttcatctgctcaaacggctgctggaatttaatctccgaatcaacacgctctgcgtcatagttacataaatattccttatcaagccagtccagtttttcctccatatccatattgccgtacagatagatgtaactgttggaaggatggtaatattttctgtggaagtcaagaaactgctcatacgtaagctgcggaatcacctccggatccccgccggattcatttgcgtaggacgtatccgggaacagtgtgttgagaacgaccctgtcgagcacgccttccggtgaggagaacgctcccttcatctcattgtacacaacgccgttatattccagcttcgcgtccgcatcctccagcttatagctccacccttcctgccggaagatctcttcatgctcgtatatattcggatacaataccgcgtccatatagacatgcatcaaattctgaaaatccttatcgttgcagcttgccaccggatagaccgttttgtcgggataagtcatggcattgagaaatgtattcagcgaccctttcacgagctcaacaaacggatcttttgccggaaagtttttggaaccgcacagtacggaatgctccataatgtgcggtactccggtgctgtcggacggaggcgtgcggaaaccgacggcaaatactttgttgtcgtcatcattttccacgagcagaagcctcgcgccgcttttcttatgtctcagcagataaccctgcgattttatcccctcaagcttctcttcctgtatcaaatcgtatgcatgtaagtcttttacactcataactgtccatattctcctttcatcattcaggctttctctccgtctccggagatatatcattagtatagaccaatctgcagcctgctacactgagcattataccagtttttcccttaacatgaaatagcagccttaaattttaggctgctattcataaaacgctctcttttattaaccaaaaaatgagtgaaatatattcagtatgagaccggccgcaactgctacagccaacgcggccactaaaatacgtgcggcagtacgtctgtttttgtaaaacggaggaacagatatttcctcttctgccccgttctccgtctcccgggaaggaaccggcgcctcaatgccgtccaccagttctcccgccctctttacatctgcttcgtccacgtaaaggtcttttccgaacacagaataccccatgtaaatactcatgtagtcgccgctttccttatcccgtatccagcattttataccgtttccttccagaacgcccgcgatcatctgcgcatggacggcattctcgacagaaataagctttgcgggacgcattgcctccatcttaccatcctgaacggaagcggactttacttctggttcacacccacgttcaagccttgtgccgcattcggcacatacggtgtacccgtcacggtattcttctttacattttgggcagtacatcaccacgcttccacctccagtctgtcttccagttctcacatcctatactttgtccacgtttccgacccttatcacgaacagaacaaggagcattaagacaactcccaccggcagcgcgatccatgccgactggacgaacccggccacaatatatgtaacaaatgacaccgcagccactgtgaccgcatacggaagctgtgtggtcacatgatttacatggttgcactgcgccccggcggacgccatgatcgtcgtatcagatataggcgagcagtggtcgccgcacacagctcctgccatacacgcagagatggagatgatcatcatattctcattgcttcccgcaaataccgccacaactatcggtatgagtatgccgaacgtcccccatgacgttccggtggcaaacgcgaggaaacagcctaccaggaatatgatcgcaggcagcagcgtcacaaatcctttggcgctggacttcattatggcttccacatatgcggcggccccgaggctgtccgtcatcgctttcagagaccaggccagtgtcagaataaggatagccggcaccatggccttaaatccatccgggatacaggacatacattctccgaacttcattacccgcctcaccacatagaagatgatcgtgagggcgaatgcaaagaaactgccgagcacaagtcctacagaggcatcactctgggaaaatgccgtgacaaaatctgcgcctgtaaaaaatcctcccgtatagatcataccgatgacacagcagataataagaagtatgatcgggaatacaaggtcaatgacctttcccctgctctcctcaccggattccggctccgcattggcataagggcggtccggcgtcgtgtacaggtctccctttgccgcgttgctctcatgcagccgcatcggaccgtaatccactttcatgaacacgaggccgagcatcatgacgatcgtgagaagcgcgtaaaaattgtacggtatcgcgcggataaagatggaaagtccgtcttctccttctacaaacccggtcaccgccgcggcccacgaagatatcggcgcgatgatgcacaccggcgccgccgtggcatcgatcagatatgaaagttttgcccgggatatgttgtgcttgtctgtcacagggcgcataacgcttcccacagtcagacagttaaaatagtcgtcgataaatatgagtacgcccaatacgatagtcgccagctgggcaccgactctggatttgatgtgttccgccgcccatcggccgaacgcggccgaaccgccggccttgttcataaggcagaccataacgccaagaatgaccagaaataccagaattccgacgttatagctgtctgacagcacaccgatgattccgtcctggaatacgtgcgtgatcgtcttttcaaacgtaaagttggaataaaatatgccgcccatcaagattccgataaacagcgaactgtatacctcctttgtgatcagcgcaagtacgatagctacgacaggcggtatgagcgcccaaaaagatgcgtacatatccggtacatactctgccgcatcttccgcggcaaatacagtcagtgaactgcatgccagcatgagcagaagaacgagtgtcccccacacgatttttttacttcttttgttcatcttacttcctctctcttcccttgttttccctgagttcctgtgataggtatgcgcaagaccacaaacaccccacatcacaaaaacgccatgaacaacgctctcgggaggcgcattcacggcataataaatgtctctatacatattgtacttattatacactgatagcgctccacttttgtgacagtccgcggcatcttatgcgcacgtcccagaatatgcacacgggatgtacacattcttcggcagtctcccctttcacacagaacagtctcccgtactgtcgttctgtgctactgatgaaaaccgcgcctctatcaagttcattattcatatagtacatttgtatcatttttacggaagcttgtcaataaatgatatatttttagcatatcttttattcccaggacctcctggccccggtgaaaacaatagtattcgctctgcttttatgataatatatataaatgggttacttgttttaatccaggattatatctatcggtatggataaaggagtaagattatgaacaacaaaaatgagcaggaagaaatcatccggctctcagatcagatattgagaacatatttctgtaataatgacctggatcttctgctgtcttcactcgctgaagatgtcatctggctcggcggaggcaggcatcagaaagcggagggacgcgaagctgtcagcgcagcttttctcgaaggcgccggcggtatgatcccatgcacgatgtctgaggaagaatatgaagcgatgccgcttggagacaattactatctctgcgaggcacagagtcatcttttagctgctgatacttctgagatgagtatggatgtctatcagcgctgttctttcgtctaccgcagaatagagaacggatgggaagccgtgcacatacacaattctgttccatttgaaccgatacaggacggagagttatttccggtggaagctgcaaaagaatcttaccggcatcttcaggagacactggcagaggcaaattccgagatacgccgacaggacaacttcctcacacagctctacaacactgtcccatgcggaattatacagtttacgactgacagatcgcaccgcatcatacacgctaataaaagagcatgggagatatacggttatacacgttccgaatactggagctctgtgaaagacccgttcatctttgtcctggaggaagagagggagctttaccgcacaaaggtagagtctctgaaaaatgacggagatattgtatattatgacagagaaggccgccgcaaagacggctcacagtgcttcgtaagtgtagcgatggcccgtctcttaaacgcagacggcgaggaagtcatacaggctgtctttaatgacattaccgaggcaaaacgactcgagctggaaaaagaaagggaacagctgcttgaaaatcagctgctgcgggccgccgtactcacaggttatcctctcatactgaatgtcaacctgacaaagaacagttttgataaaataatatctgataactttatatgtaaaaatacatccggcagcaattttgatcatctcgttaaagaagcttatacgacgatctacccgtcttaccgcgaagtattccgggagcttttcgacagagatcatatcatgagtgaattccaaaatggaaaccgtgagatctttaccgagttcaggcagctcggggatgacggagactaccactggctttccgtacatatcatcgctgtggacaatccgtatggacaggatacgctgtccgtcatgcttttccgggtgctggatgaacagcacgccgcacaggcacggcaggaacaactgctcagggatgcgctggaagaagcgaaggctgccagcaacgccaagtctgatttcctctccagaatgtcccacgatatccgcaccccgatcaatgcgatcgtaggtatgagcacgatcggtcagttgaaaatagacgacaggaatcaatctgtaaactgttttaaaaaaatagatgactcctcccggtatcttctctctctcataaacgatatacttgacatgtccaaaatagagaatggcaagatggccctgacagacgagcagtttgatctccacgaactcataaattccatcacggcaattgtatattcccagtccgtatttaagaatatccaatttgaagtatactgtgaagactcactgcagcagtactatctcggagacgcactcagaatgaaccagatccttatgaacctgctgtcaaattcgctgaaatttacgcccgcaggaggaatgatcactctgcatgtaaaagagacgaaacgccgctgcggatattcttatcttgcttttcaggtgacggacagcggcaaagggatgtcggaagattttatgaaacggctctatcagccgtttgagcaggaagccgcagatacggcccgcaacttgacaggcacagggctcggcctttccatcgtatataatctcgtgcagctcatgaacggaactataaatgtggaaagcaggctcggggaaggcaccgtcttctctatagaaatacccttcaggctcgtggaagacgaaatatggaaagaagagcagcgaaagcagcaggaactgctgaacggcatgcgcatactcatcgtagatgacgacgaaggtgccggtacgcaggcggcggctattctggattcctccggcgcagagtgcacgtgggcttcatcgggacgtaaagctgtagaatatgtcagagagtctcttgcaggaagccaggcatatgaactggcgcttatcgactggaagatgccggaaatggacggtctggagacgacaaggcagatccggaagctcgtgggcagagatacaatgatcattatgatcagcgcctacgattacaccgagatcgagagcgaagcaagagcggccggggctgattattttatatccaagccactgtttaaaaccgacctctgcaatacgctgtcccgcataaacgtacccaagaataacgcagataccaaaacagatatcaacttccaaggctgtcatttccttcttgcggaggataatgaactgaaccgggagatcgcacagactcttcttgagatggaaggtgcatgtgttgacactgctgaaaacggccaggctgcagtggaagcttttgccggaaaaccggaaggttattatgaggcagtccttatggatatccgtatgcctgtcatggacggactggaagcaaccgctgaaatacgtcttcttgagcaggaacggaccgtaagagtacctgtaatcgccctctctgccaatgcgtttgacgaggaccgccagatggcctacaaagccggcatcgatgaatatctgatcaagcccgtggaggcagaacaattgtaccggctgctgcagaatatattatgataatggactgcattcacatgcagatgttataaaaagaggaggacaggcgcggcccgtcctcctctttttttccgccgggccaaacgcccggcggattttctcttattctgctccgtaaagtgttacgagcttcttcagatagtcatacctttctttggcttctgcttcattcttcgcaaacagcttctcagccttctccggattagctctcttcagagcgttgtaacgaacttctccgtcaaggaatgcctggtaatcacctgtaggttccttgctgtcgagcgtaaatttagctccttcagccgcaggattgaaacggaagttgttccagtatccgcattctaccgccagtgcttcctctgtctgagctttgctcatacccatcttgattccatggttgatacatggagcgtaagcaatgatgagtgacggtcccggataagcctccgcctctgcgatcgcttttacagtctggttataatcagctcccatggcgatctgtgctacatatacatagccgtagctcatcgcgataccggcaaggtctttcttcttcgtctcttttccgcctgccgcaaactgtgctgtagcacctgtctttgtagccttggaagactgtccgcctgtattggagtaaacttctgtatcaaataccatcacattgatgtcttcgccgcttgccagtacgtggtcaacgccgccgaatccgatatcgtaagcccatccgtcaccgccgaatacccactgggatttctttgcgaggaagtctttgttcttcacgatatcgctgcatgtcgcgcatccgcatccttctaatgctgcaacaagcttgtcagaagcatctccgtttgtcgctccgctgttgaacgtatccagatattcctgacatgctgctttcacctctgctgatgcctcatcggaaccaagcacagactctacattttctttcagtctctttctgatcgctttctgagcgagcagcataccatatccaaactcagcattgtcttcaaacagagagttagaccatgcaggaccctgtcccttttcatttaccgtatacggtgtagacggtgaggagttaccccagatagaagaacatcctgtcgcattggcaatgtacattctgtcgccgaacagctgtgtgatcagcttcgcatatggtgtctcaccacatccggcacaagctcctgagaactcgaggagaggctgtttgaactggcttccctttactgtctccggtttgaacttggcaacaacttccggtttcaccggaatctcttttccaaagtcaaatctttcctggcttaccgttacgttggcttccatattctccatgacaagtgctttctcacccttcttgcccgggcatacattagcacatgaaccacatcctgtacagtcatagcctgatacagtgatcgcaaatttcattcccggcatgccgaccatatcgatcgctttcgttccttccggagctttagccagttcatcttctgtcagtgcgaccggacggataactgcgtgcggacacacatatgcacagcggttacactggatacagttctcttccttccaaaccgggatatctactgcgataccacgtttctcatatgcagaagaacctgacggtgtagaaccatccacatactcgctgaatgcagatacaggcagggaatttccttcctgagagttaaccttggactggatgttcttgacaaaatcaacaacatcttctcttccgcccttaacttccggtgtaaacagaccttcatcttccgcgctcttccagctgtccggaacagaaacttctactacctgcttagcgcctgcgtcgatagcgtcgtagttcatctgtacgatcttgtcgccttttcttccgtaagtagcttttgcggccttcttcataaggtcgatcgcttcttcttccggaatgatggaagcaagtttaaagaatgcagactgaagaactgtattgatacgtccgccaagtccgatctctttaccgatcttgataccgtcgatcgtgtagaacttaatgttgtggtcagcgatgtatgcctttacctgtcccggaaggtgcttctcaagtccttccatatcccatgggcagttcaggaggaatgttccgccgtcgaccagttcctgtaccatattatatttatctacgtatgaaggattatgacaagccacaaagtttgcctgacggatcaggtatgtggacttgatcgctttctttccgaaacgcagatgtgacattgtgacaccgccggacttcttggaatcataatcaaagtaagcctgcgcgtacatgtctgtattgtcgccgatgatcttgatggagttcttgttcgcaccaactgtaccgtcagcgccgagtccccagaatttacagttgatcgttccttccggagtagtaacaagaggcgcgcctgtctcgagagagagacctgtcacgtcatccacgattccgatcgtaaatttcgctttctctgtattgttgaacactgcaacgatctgagctggtgtcgtatctttggaaccaagtccgtaacgtcctgacaatacaggaaccgcatcgaacttcgtgccctttaatgcggcaactacgtccagatataacggctcgccgaacgcgcccggctcttttgtcctgtcgagaacggagatcgtcttaactgtttccggtatagcgtcaagcagtgcctgtgcacagaacggtctgtaaagacgtactttaacaacacccactttttcgcctgctgccatcatatagtctactgtctcttcaatcgtctcacatgcggaacccattgcaatgatgactctctctgcgtctgctgctccgtagtagttgaagagcttgtagtctgttccgatcttctcgttgaccttgtccatgtaatcctgcacgatagccggcattgcatcatagaatgggttgcatgcctctcttgcctggaagaagatgtccggattctgagcagaacctctctggcagggatgatttggattcagggcatggtttctgaattcatcgatcgcatccatgtcaacgagttctttcaggtcttcgtaatcccatgtctcaatcttctgaatctcgtgagatgtacggaatccgtcgaagaagttgatgaacggtattttccctttcagcgccgcacagtgagcaaccggtgtcaggtccataacttcctgcacgctggactcgcagagcattgcagcacccgtctgacgacaggcgtaaacgtctgagtgatcaccgaaaatagacaacgcatggcttgcgatcgcacgggcggatacgttaaatacacccggaagctgctcgcctgctactttatataagttaggaatcatcaacaataatccctgagatgctgtaaatgtagttgtcatagcacctgccgccagtgaaccgtgtactgctccggctgcacctgcttctgactgcatctctgtcacttggacagtttgtccaaatatgttctttctcccttcggttgcccactcatccacatgctccggcataacagatgacggtgtgatcgggtaaatagctgcaacttcagtatacgcatatgacgcatgcgctgcggcctggttaccgtccatggtcttcatttttcttgccatttttgttgttcctccttaaaatatactacatattattataacttgacgtatacattcattatatccccagtacctgtaaaagtctagtgaatcttggctttattttgttcctttttccgtacacgaagaggcctccgcaggccctctgaaatggataaattcttgacaattgcatactgttaggctatactaaaaaagaggattggattgggtaaggatgctctcacagctgctgtgagcgcatccttttttaattcaacacttctcaaatatagtagagattggagtgttgttatgagtagtaatgagactggtactggcaacagtacaaaagaccaggcgcaatggggttcacgttttggttacatcatggtcgctgccggggccgccatcggacttggcaatatctggcgttttccgtatctggcctacggagggggcggcggtgtatttattgtcgtttatattatcatggctttgcttatgggttaccctcttatcaaggcggaaagtgccatcggacgctacgcaagggctaatgtggcggcatcgttcggcgctgtcaagaaaaagtacaggtttatcggctggatcgccatgctctgtacgactttgatcgacatgtactatgtcatcgtcggcggctgggtgctgaaatatgcggtagcttacataacaggggcagatttcggcgccgatacgcaagtatattttaatggttttacatcagccacggcagagccgcttatctataccgcgatcataatgatcgtcgtagccgttctgttattctttggtattacgaatcttgtagaaaagatcaccaagtttattatgcccgcattgttcatcctgttagtcatatgcggcatctgggccgttttctccactcctaatgcggcggaaggcctgaagtattatattgtacctgatttcagcaaaatgagcgtaaaggtttttgcagacgccgctacgcaggtgctgttctccatcggaatcggctggggtatctttgtaaccctgggcgccagtcttccaaagtccaataacatcaaaaaagattctatatggatagctgtctgcgacactgttgtcgcgctgactgcaggcttcgtcatcattccttctgcttttggagcaggcgttgatgtatccagcggtccttcacttatcttcgtggtcatgacccagatattctccaaactgccgggcgggcgcttcatcggtatcttcttcttcattgccctgctgtttgcggctctatccaccttgttcacgatcattgaaataccgaacaagtggctggaagagaccgcccatatttcacacagaaaatctacaacgatcacctccctcattatttttgccggcggtgtcattgtatctcttggcttcggcatactgagcggtgtggaacttccgttcctggatctgaacggagtatcgtattacaacatatacaactggctggataccttcacagcatacatcctgcttccgcttggctgtctcctcacctgtttctacgtggcaaaggtctggggcttcaaagagttcgaaaaagaactcaccgtcaacggacgcgacggcggcttttcacagttccagaaactgctctatgccgtgatcgtgccggttctgatgctcgttgtaatcctcaactgcttcggattcatcaagtaattgggaattttgttgtagggaatttgggaattgctgcggtgtacggtgtctgagaggcagggctgggtgaccggctggtcggtacgcttgcaggcgataagtaaaaagaatgcggggaacgcagacttcagatggatttggcgggaaagcctgatgctttcccgccgcagccatctcaaactccggacttgtggtccggagtttggtctgtgttccccgcattcgttttactaaccgcctgacaaagctccctcccacagccgtccacccagccctgcctctcagacacctgacatttcacttaactcaaatttcctcaacgcgacagattcactgggttgatacaacggatttatattctggctatatccattgtgttgacccaggggaatctgacggttgaagtgtttatgagcctggagatgaacaggcgcgggggtgggcgtacatggctgcggctgggcgttcggaggcagatgtggaagccgttgctgcgggaagagccgggagcagacacgggaatgttatctcaaataacattcccgagagcctctgagggaggaaatcccttcaggatttcattccgaataggctcggttgtctaatcccggctcttcccacagttacggcttcccagctgccggagcgtcctgccgcagccatgtacacccagccccgtgccgtccgcccccaaccattatccccttcaaccactccccatttatacaggcagactgtctctgacgcacagcgctccatacccgatctggggattgggatattctgtgaatccgggcaggggtcttgctcctcttctcaagtatgcctttactttctctccatacagatatgggtcatttcctctcacgattccccattccatcagaagcgctgtgcttcctgatacaaacggggccgcaaatgatgttccggtaaatgctgcatagccccctccgacggtcacggtcgtcacgtttacgcccggtgccgcgaggtctggttttatgaatcttcggtctcctgaaaatccgcgccccgaaaatcccgcatatgtaaagtcgagggcattgtatgcccctaccgcgatagccctgcctgccgtggacggaatggtgagcgtcgcatcgtctgtcggaaaggtgaacccggttccccggttcagcacattttcgctcggcagccacatctcataaaatccggtcactactctccggggatacagtacgattctccatatgccggcggatatatagctctctctcgggagcatatctataaatatctcctgggaggcgctgtatgggcttggttccccgtagtataagagtatctccgtctggccggccgtgaacctctggggcccgaggatctcctggatcggtcctacccggattccggaaggcgtaatgagtgatatgtctaccacgtccgtgtaagctttccatatctggacattcagcgtcggctggttatcctgcactgccagctcgatcaccgtctcctgaccctctgtcagtatgccggacgtgtgccccgcactcgccgcctcattgccggctccaatactgatgcagcttttccacagattggatatgtcgtctataaaccgctcaaggagcgacgttccgtcatgggcgccatatgtatttccaaagcttatattgacagcgaccggcatctcatattccactgcctttctgatcacataatcaatgccctgcataagttctgtcgtgcgggggaagccgtctctcctcggactggccagttttacgacaagcagttcactctcaactgccactcccctgtactgccgccctaagcttccccgcccgttgccggctgcgattcccgccactgccgttccatgccctgaagtatccctgcttggcacaatgcttctcatccccgcttctgtaccggcgctcaatgcctcgtttatacgttctgtactgtattccactccgatcgcatatccggccggcggctgcccgccgtctcccggaaccgatgactgatcccacagtgcctttatcctcgtcgttccgtcgtcatttctaaaatccggattggcgtagtcaatgccggaatcgatcactgccacgagcgtaccttgtccggataaggaaaaacgggccccctgtacttcatcaatacaggatacccgtcttccgttggcaacttgaaagaataaccgtttaggcttttctatatactctacttgtacaagtcctgagagggccccgatcagagactcccgaatcgttatcaccgcatattcgttctgcagttccaccacctcgtccgcaagttccctgacaggtcccaggtcgccggaatatttgatgatcagatcccactgtctgtcaacaggattataacccacatcaagttccagcgatttctccctctcctcttctgtagcatctaatgcaagatttaacagattatctgctttctgacttgtcatacgctacctctgccttcaataatgattatttcataaattcgcactccagatagggtgccagttctaccggtataaaatatcctttttcatgtctgcacgtagggcatacttccgggacacgtttcccgcggtgtatatgtccgcagttcaggcacatccatgccccttcgccctcgcgctcatagtacgtattattctcaagcatctccgcaagttttccgaagcgtttgccgtgaaccgcctctacgtctgctatctggtaaaatgcggatgctgcctcaagaaacccttcctcttttgcaacatcgccgaattcctggtacacgtcctcatactcttccatctcgttgtgctgcgctgacctcagaagatctgccaggctgtctgaatgatcgatcggatatccgccgctgattatgaccgtctcgcctgacaggctcttaagtaagctgtaatatctctctgcatgcgcgcgttcctggtctgccgtaaataagaaaatctggctgatggaatacattccctgatgacgggctgtttctgccgcgatcgtgtaacggttgcgcgcctggctctcacctgcaaatgctctcatcaaattctctttcgttctgctcttttcaaaatcaatagccatgtcacatactccttttcacttttattactagtatgtaccatggctggtaaattattctttatttagttaaatcctatgattctccgcgccacgctgtatgcaagagaagatatctttcttcctgatttgccgggcagattgatcgtctgtcctagaatgccgtatcttatcttcatgtaagtctttacgtctttctttttaagatatttccacagttcctttttcttctccagattctcttcttttttagagcggatgagaagtatggaggatacagtcatcataatggcaagataattgatcatatactggcgcagcttcctgctcgtcacacttctgagctggtacatctcgatcatggactttgtgacaaatatctgctggtccacccgcgcgatcatgttcttctcgttgaccgactgatcttcacggccgataaagtaacggtaaaaatccacatccagataatagatcttcctcacatggggaagcggatagtacacatatatgttgtccacgtaaaacgtgtgcttcggcagacgcatctgggataactgaagcatggccgtccggtatatgacagaatgcatgagtatatactggtcgagccggaagtgcccgatatcatcccaccggaatatctcatcttttgggagtacattcctgtaatggacgcatcttttatgcgtcactcccaccttctcatagacataattggagacgagcatgtccacttcctcgtcatcctcctccagatctctgagcagcttcagtatcttgtggagcgcctcttcgtctacccagtcatcgctgtccacaactttaaaatactttccctgcgcattgctgaggccggaattcacggcatctccgtgcccgccgttttctttatccacaacttttacaatatcaggatatttttccgcatattcgtgtgcgatctcagacgtccggtcgctggaaccgtcgtttacaatgatgatctccacagcttcaccgcccggaaggatgctttcaaccgcatgttccatataagcttcagaattataacatggtattgcaaatgaaatatatttcattgtatttgcttcctttcttgatcaactgtttattagtataatgcattcttcctctttttccaactgaatattcgtaaaaagtttcgctacagattgtaaaatcataaattatccgatatagtaattacatagaattggaggaatggatatgaagaaaaacatcattgtaggacaatccggcgggcccaccgccgtaatcaacggaagcctgtacggtgtcgtgtcggaaggcgtgaaacagacagaacgtgtaggacaggtcttcggtatgatcaatggtatcgaaggctttctgcatggccgctgtatggacatcggagcgcttgacgcgaccaatgaactggaacttgtaaggaccacacccggagcatacctcggctcatgccgctacaagctgcctgaggatttaaaagatccggtgtacccggaactttttaagaaatttgaagaaaaaaacattggctacttcttctatatcgggggaaacgactcaatggacactgtgagcaagctttcccgctatgcgtccggtatcggcagcgatatccgctttatcggtgtaccgaagacgatcgacaatgatcttgtcgagaccgaccacactcccgggtacggaagcgcggccaagtacgtcgcgacaacggtccgtgagatcgcgacagacgctaccgtatatgacaacaagcagtccgtgactatcgtggagatcatgggacggcacgcgggctggctcacagccgccagcattctggcgcggaaatttgacggagataatccggtcctcatttatctcccggaagttgcatttgaccaggatgcatttatagaaaaagtaaaagaatctttaaagacaacacccaatcttgttgtatgcatctcagaaggcatcaatgacggaaagggcacctttatctgcgaatatgcaagtgatgtcgggacagacaacttcggccataagatgctgaccggttccggcaagtatcttgaaaaccttgtcaaagaacggatcggagtcaaagtacgttctgtcgaactgaatgtatgccagcgctgttcctgcgctcatctgtcaagagtggatctggacgaagccggaaacgccggtatctacgccgtgcaggtagctctggacggggagacgggcaagatgatcacctttatccgtaataagagcgtaccgtatgagctttcttacggcacggccgacgtcaatatgatatgcaacaaagaaaaaccggttccggacgaatggatcataagcgaaggctcagacatcagcagcgaattcatcgattatgtaaggccgctcacacagggattcgtagaacttcccacaaaaaacggaatacctctgttcgcataccgcagataaaataaataaagcagagccggggacgtgtactttttaaaaagtacacgtccccggcctcttttagatttcgcttttttaactttgtcccgcagcagcccactcatacttgccattttcacctacgtgatagaagtctgcaaaattaatatgaaagatatcctttttaattccgcttacatcaattttgttctttatgaggtactgccatgtgcctgcgtttgagatatctccctgcagcagtatgccttctactttcccctcccgcagaatcgcccgtttgtattggcttctgtcttcttttatccggatatcgtcgccttcttcctcgcggatcctgccgacgcacaatgtcacaaagccaaaaaagttgatcgtattcttgagcgcataagtatcctcatacactgcatggataccacacatattccgcccggctgtccggccctggtctgtggcattgggccatattccagaaagaccggtgatatcacctgcggcgtatatgcccggctcgttcgtctgcatgtgtgagtccaccgtcacccctctgtcacaggcgatgccgcttccttccagataggctgcagacggtctcacacctgcggccacgataataaggtcacaagggatctcctcgccgttatccagtgtcactttgtggatctttccgtccgatccgcacaccgcttcacttgcttttcttccgaggataaagcggactcccgcctgctcgaaaagttcctggtaagcctgcgccgcatgggcgtcaagctgcacgggaagtatctgcggcgccatctcaactatcgttatcttccgccctctctccagcagtccgtacgccgcatccagccccacaagaccggatccgataacaagtacgtgttcggcacattccgcctctttcacaatggcctgggcgtcggacagattccttaagccgaatacattggaggcttttctcagctctcccacaggaggaataaaactgtctgaaccatttgccagaagcagtctgtcataccccattttttctcctgtggacagttcgatcttcttctcttcgggacagacagcggatacacgcacgcccttcacccagtttatgttaaattcatcccagaaattttcttccgtaaagtccagttctgcctcgcttcgttcacctgctatatatttgtgcagcatacagcgggaatgtacatatgtatctgctgagatcacgtatatatctgcagagctgtcttcttttctgatggtttttgccgcagtaagacctgctgtcccggcaccaatgatcacatatttcattcctgcacctcctctacatatatagcttttttcggacaggatgccacacacgatggttccccgcctgcatttacacagaaatcacatttgatcactctgctctttgtcacgcggtcaggctttagaactccgaacggacagttcatgacacacataaaacaggaaccgcatctgttttcgtcataaaacacgtgcccgctctcagggtctttcttaagcgctccgctcatgcatgatttcacgcactccggctccgcacagtggcggcagaacagcggcctgtacatgcccttttcatctttcaggataaaattcctcgactcattctccgggtcggtcagatcaaggtcgtatatcgttccttctgattttctgtgagcctgcatacaggctgcggagcagttcttacagccgtcgcatttctcataatcgatcatgatacgtttcatatgcaccgcccctttctatatattcaatccctgtcgtttttccagtacgatctgctctaatatatccgcagattcttttgcatctccattgatgatcacctgcccgccggtcaattgcttcatatcttctgtgagcacctgtacggccaccttgcttccggtcacgaaaggaggaaggccaaggtgaagcggaaggccgagcgccagaccgtaacagccgtctgccagcgcctgctcctccagccactgggcggcggacagcacgagcggaagctgcggcagatcgactcccagttcttctgcaagctctgtggccacaatttccagacgtccgatggcgagacaggggccaaaattcagcacaggaggtatgcccagcttttcacagaccgccttcagcttcggtcccgcatactgcgccgcctccggtgtcataagaccacagttttcgattcctcctgaggaacatcctgccgtcagaacgatgatatcctttgcgataagctcctttaccagatccaccgtcagtacgtcatggccgccggctgtgaggttggaacagcctacaacgcctgccacaccttttatatccccggacacgatcaggtcgatgagcggcttccagctgccgccgaggaacttcttaagagacacttcgctgacacccgtaagcgtattttcgtagccgtgttcccgcatgagattcatagggactgtgcctctgcgggctgcatatgcctccaccacttcgtcgatgatctcttctgtaacggccggacggttctcaaagtcaaattctttaagctccgcatttgctttctttgccacattgtcgatacagatctgcttgatcttcagctcgtcacatatcggttcgattccaggaagtgtacagttgaattccgagatgactgcatcgattcctcctgttgcaagaatcgcttcactcgtataattgttgcctgcatgcccgtcaaagatctccgtgtaatgagcgccgcgaagctgcagatcctgccccacacacgtacagccaacaagcttgaaccctttcgctccggccttctttgccttctccacaatgtccgcatccgtcagacggtcctgcagaaatgtaaacatcgaatgctgatgtcccgttatcataatgttgatataatccggatcgatgaccctcaggccaaccggcgcaaagcggatctccggctcgccaagcacgatgtcattgagcaggttcgtcagcacaagcccatagatccctgttgatattccaagcttcagacagtcaagcagcatattgaccgggtctgaattcagattcgtagaacactttaccacgccatggaacacctcggacttcgcgccgcccggcagtatgccaagctctttccacttgtcgtagcgcggtgcgtatgccatcttctccgtaagctccattttctcatattccggcagatacagatctttgagcactgcgtcggcaacagcctccgcccttttatgtacgtcggcttcctcaattgagaaaagagctgccagccggtccagcgtgttgattcccttgatctcgccctttgtcttagccacgtttttgacgttgagcgccgtattctccacgatatgtatataacagcctgagcctgacgccacagctctcaaaagatttctcgtcacgatcgtatctgcgtctgcgccgcagatcccccgcggggcttccggtgaaatacggcacggaccgttagcgcacagtctgcagcagactccctgcagtccaaaagcgcattttgtgctctgattttctacacggtggtgggatgtctccataggaagccccgcaatgtacccctccagcagtttatccgcacttttacacgtgttgcatccaaaacattgattcatagtcttacctcctcgaaacttgataaatttagtccacttttgttttataaaaattctcccccgccagggagggattatttttcctttttaaaacacctccgataaggtacgcgccttcagttctctcataagaactctctgtatctgtgcaagctccatatgtactttacatgcgttcccgccggtgttcctgctgcacgattttctgaggcacggcatgatgaccggctcctcgtccacagcagctaccacgtcgtacagcgtgagctctgtgagactcctgcccattctgcatccgcctgcagcgccccgctccacctctacgattcctgctttctggagctttcgcactattttataagcaaaggcttccggaatctcttcttcctgacatatatctttcatcgtatgcttctgcccgtctctcatcgcccgcagcatacggatcgcgtaatcattttctctcgttaaaagcatcttttcacctctttgttaaaactttagcataccggacttaatttgtcaactttatatctttcatttcacatatactatacataaatataaaagcctgccgcagaaccaaatattttcccgtctgcagcaggctctcgttttaatatgtttatcagacagaaggctgtatcctggccactttactcttaaccgcagcgtccgccactgcttttgccactgcatctttcacgcgtgtatcaaaggccgccggcagaatataatctgctgtcagctcctcctcactcacgagatctgccagtgcataggccgcggcaaccttcatttcatcattgatatccgacgcccttacatccagcgcgcctctgaaaatacccggaaacgccagcacattatttatctggttcgggaaatcgctgcgccctgtagatacgactgcggcaccgccggcttttgcatcatccggaaaaatctcaggagtcggattggcacacgcaaatacgaccgcgtctttcgccattgtctgaaccatctctcgtgtcatagtgccgggggcagaaacaccgataaatacatccgcgcctttgatcacttcctccagagtacccttttcgcagttctggttagtgatctcagccatctcctgtttgataggattcagaccgtccctgcctctgtaaattgctcctgtccggtccgtcataatgacattctttactcccatgctgataagcagcctgataatggcgatccctgccgcacccgcgccgcttgtaacgatcttgatatcttcgatcttcttaccgacaagtttcagcgcgttgatcagtcctgccagagtgatcacggcagtgccgtgctggtcatcgtgaaagatgggaatatcacatttttcttttaactttttctctatctcaaagcaccggggcgcactgatatcttccagattcacgcctccgaagctgcctgccatcagcgcaaccgtattgacgatctcatctacgtctttgcttctgatgcacagcggtatggcgtccacatcaccaaacgctttaaagagtacgcactttccctccatgaccggcatgcccgcctccggtccgatgtcgcccagtccaagcacagctgtcccgtctgtcacgaccgccaccgtattccaccggcgggtcagttcataactcctggaaatgtcttctttgatctcaaggcagggctgcgccacccccggtgtatatgccagcgaaagagcttctttgttatccactgcagctcttgccgtcatctcaattttgcccttccactcgtaatgcagcttcagtgattcttttgcataatccatgatatttcctccataaactgaatttttatatgtatattataggttagggtgtcgaaaatagcaacttaatgatcacagacgtccgctcatttacaataatgtttgtataatgcctctgccctctgtctcattacatctatcagttcttttggcccctccacctctgcatccgggccgagcggaaggagaatatcagctactagcagaagagaggattccgcaatattcatatcaacgatgcctgagccgtcctccagaacttcaaggccgcgcgcgagcagaaaatcagcctcacaccgctttaccgcaggcccgctcagctttatcctgatatggtgatcgtcaccagtctctattctaccgagatatctacgaagagagacccgcgctttcttctctggacgttcaatgacttctatgatttcttctatacggtccacacggaactctcggaccgctccggccttcatacaataggaggggacataccacagtccgttcatggcatacagccctatcggaacgagcgtcctcaccgttacggaatgctctgacgcataacggaccgtcaccgcttgatcgtttgtcacaatatccagaagctccttcaaaaacggggaatcgcagtgtctgtccggcacccagaagatcaccttgctctggagctttgttatactgttttgcatatcggcaggcagacagttcagaaacttctttgagacggaaatccgctcctgctcaaacggaagatccttataaaactgcagcgactggtaggcaaaaaagacagcctttgcctcattctccgagaaggtgatcggcggaagcacccgctccttcagaacatgatatccgcctgccgccccaacctccgagtaaagcggaaaacctgcctgctccagcgactgtaagtctctcagcaccgtccttttcgaaacggaaaattcttccgccagctcgctcactttaaaatgcctttttgcgtttatagttatcatcatctcaataagccgctctgctttagacatgttgaactcctttctctaatagtgacattagttgtcactattatatgatactatgttcatgagtctcacgcaaccgtatgaaacgtagacatatgatacaacatataaggaggagcagcgatgaccggcaaacataggatatggtatattacagcaggatgttttttaagttattttttatttggatttatagataatctgaaagggcctgtccttcctgccttattggcagacgcggactttaactattctgacggcggcacgatcgtattcagcgaatatacaggcttttttgtcgcaacctttcttgccggtctgctgtcagatctattcggcaagaaatttacgctcattctgtccggcatctgtctcatcttcggtgtcgtcgggtatgcctcttcttccagccttatttttttcattgtatttatttttttcatcggacttggactcggttcgcttgaattgagcggaagcaatattatttccggtgttcacgttaagaatagcggccgctatctgaatctgctgaatgctttttacggggcaggctctgtcctcacacccgtactggcaggaatcctcctgaattcaggcatatcctggcgcacggtctacagatacagtctcatggtgatcataccgatcactctttattttatgacaatgagactcccaagggaagagatgaaacataagcccgcagaaaaatcagacttcagagacattatccagacagtatcaagaaaagaagttattttaatgtatatcgtaatatttgcttatgtcgccgcagaaatctgtatggctacatggatggtggaattcttacagaaatctaagcatatatctgctgccggaagttccatatacttttccgtatattttgcctgtatgacggccggccgtctgctcggcagcctttttgtggaccggatcggacatgtgaaaagcctgcttatcttttcttccatggcggctctctgcctggcgtttggaatctttgggccgcagaccgccgcattcttccttgtacttacgggattttgcttttctattatatttccgaccgccacagcggtcgttaccggatattcgtcaggcagttccggtacattgctcggcctgttctttgcattcggaggtctgggcggcatgaccggcccctggctcacaggcattatgaatgatctgctcgggctgaaatggggaatgtccgtaaacatcatattctgcgctgttataatgatcaccctcatcctcctccggcgcataaaaccaagcgctgataaatagccgctgctcgttcataatttattcatttatcattaaagaaactttcacttctttaacattgtttcttcacacgtgtatcttatactaaaatcatcaaatgaagaacagaaacatttgatactgaatataccaactgtctagtagtaaaatactattttgaataaactttttcataatacatgccaggaaccggctgccggttacctggcatcctccctttttacggggattttcagactttccatttccgcctctttccccttacattaaatatgacacaactttttaaaataagttcgctattttctgtatttcatccaccttaacattaggcaatacatgattatataagtccattgtcattgtaagagagctatgtcctagtatagtctttaagacctgtggctgcataccattttcaatgcatcttgtagcaaatgtatgatgtagagtatggatgtgtataggttcaaactttatatcgtctctctggatcaattcttgtatatgcttcatgtaatactgcatggtattcaatgtaacaacgctcccaaattcatttgtgaatgccagattatcaagcccgtcaagcggcgtccacttgtcccctaatgcaatttttagttgcaaccacttcttacgcttctgttttaagatctggtaaacattatccaaaatggggatatctcttttcaccggattcttctgtataattccatttttatacgcctgttggaacgaaccattcaggatcacatgaattctcgtaagtgtctgccgttttacacgcttagcctctgcattaaaaattcgttgtatgtgctctggccggatatccttcagctttcttttctggatatattgcttgatatgcccctcgtaagtccgttcatacaaatcataagtagtaggctttacctgattcttcttatattcttccatccaggtatgaaaccatgcatctataattatattctgctccttctcatacagaccgtgccttacctcatatttcagatcctctatctgttcaagaagactctctaatttgtttccatacagtgtatagctctctccctcgtattgaaaccgtgccatataccgcccatctttacggatagtgatacctttgggtagcttcctccctttcttataagaaagggctgtcaatctataaaatccggaaggataaaatcatttcagaaagcactttacagaatattcgagaaggcaagcgtataacaactgactcaatagccgctttgtgtcaagcactaggttgccaaccgggggatatcttggagtatgtaccagatagcaatattcaaccattttctaaacactcagatatcccccctagctttcgagaacttagtactaaagaaaagccatttaatgagtacaggaattcaaaagggggcgttcttaatattatggaaaaattaaaatatatttacgaaaccatagaaaaaataaatgcaaaacgccctgtctcgcaaaaagagattattatagcaattacctattttgaacaattgggtatgtccggaaagtttcctggctccccaattgaacaaaagcaaattggtaaactacttaatatagcacttcaaaacaaaaaataaacactctacacatttctgtgccttatagttcctagaaaggagaacctatggttgaagacaaaaaatacatataccaggcaaaccgaagcacgaagacgagcttctacaaaatatctcaaggaatccgttgaagatatttgcatcagagttccaaaagcttaaaaagccagtgtttaagctcatgctgaagggcgcggggaaagcatgaactctttcgttgcccgcgcaattgatgacgctatgaaacgggacaagaatagctgactttccgacaaaattgaagaaaacctaaccagcacaggattgcgttcagtagaatatactatgcacccccgatcgacgcttttctatttagggggtgcacagcattttgaggatccccgtactgaccggatacctataaggcaggaagtcttaattactcgccactaaatttaagagagcgcaagattatgctatccgatttatggggttactgcttttgcatgatctaaaattgggaggttttggggaggtagaatctcaggatactgcttttagggactcagaaaattaagataatcttgaatcatgctgccagatatgcgtggtactattaatagtaccttcgtgaaatgagcctacgatagccgtttactgcatttatagtattatgcttgatgttttactataaatgtagtatattatagacataaagagaacaaccgcccacaaagtggttagcctcaagagttaagtaattgccttacggcaaccgcctatcctgctgcgaacagggtaggcatttttattttcgcttattgttcctatctatgtaggtaagcagcgcaatcaggaaaatcccgaatgtcaacatcatagatattgcatctgatatatccatctgctccaccccccctcttctgtgaagtccgggaggctaccaccctgtatacggttgttctaatcagagtgtaacataattcaccttacccctcaacaccgttttacagattcttcctttcaatatttcattatcaatgtactctgcatgtacttcttgtaaaaaatcctttttccccctttaggcataaatttctaccttaaagctatttcaatatcacttttcccgttcccgtacttagttttgaagtgcaggattccacatcagcatgataatgcttgcatcctgctcgatgtcaccggcctcccgtagttctcccatagtaggctctttattttccctttgctcgcttacacggtttagctgcgacagggcgatgatttggatatccagctccattgcaagtgcctttattgccttggagattgccccaacctcgctggcccggctctgataccttacatctgtcctcaatagctggatatagtctataatcaggcaatcaaggccaagatgacggcactcgcttctgatttcggacactgacacggccccgctcctgatatgcatgtctactgttgccagcgcatcgttcgctttctggaaccgctcttcttcgtcgctaaggaatcccttcgccctgcggattctcgtcagccctatcttgcttacgccggacaggagccgctcatatacctgtctgtcagacatttccagattataaaatcccaccctcaggtcagcctccgccatgtgcagggctatcagtgaaatgaaagccgatttcccaactgcgggcctcgcacctatcacaatcatgtctccgccttccaagcctccggtgatatcatccggcttagggaatcctgtcagtatccgcctgccgtctgattcccgaaagtatctgccgcttgctgcgtcaatgacctcccccaacggatgtatgcttgaaatcctattctccctcaaagcctccaagctatacatcagctcaccaatctgctggtctatatggcccagtgctggtccgactttggaaaggacatccttcaggcatcgggcttatagtctgctaggagtatctcattgtacttctcaatctccgtggagctgtatatgctgtctaggcaacccttcagttcctgcacgatagactcacgtgttatgctcctatcctccagcttttgggctatccccaggatggtcagcctgtcccctatgtcataggcccgtacaatctccgtgtatgcctttctcagaaaagggttcaggaacatgtccggcctcaggctttcatataccgccgacatacaggtctcattcatcaatatacatcctatcaccgcacgctctgccatatcactcatctgtttccaccttcacatagtcaatgagttggctccccatcaaggtatcaaagttcttgtaatattcaagctccgttccgctctcttcctgctgccctacatagttgcgcaccgttatgtatatgtccctgttggaaagcctcgtccttttcccgttcacagtcctgcctttcagccatgagcagtagtttgcaaaaactctcgtcctccctcgcttcttcggatagatagcatagattttttcaaagtctgattcacgattttctgcatcagccttgcttttttgggtgtactcgttcggctccggcgaacatgtattatttatattcttattctctttcttattcttatctggacgtctaacattagatttactattagctttaccgttagctttacacgtaatttgcttctgcttttcacggtattctcgcatatattccctctgccatttccgcatgattggccggaagaaaatatcccccggaagagcaagagcagatccctgcaccggcgttcctctcggatgcaatatactgctgcaactctctggctgatgtacagcctgtgatgcttacgagttccgccgtactgatggcattctctttcccgataggtaataggcttgctatatgataatcggccttgccgggctgattatctgtatgtacttggttatgcttactttttgtcattcctatttcacccccgtgagtgaatcaaagtattcgtcaactttccgcttgtcccataatacacgccggtcaatctgtaccctggccccgatttcttcgccgagcttcattgcgttgttacggcccaggttggtatatgctcttaactcttccgtgtccataagacgggactccccacccacaacggttacagttctgttcttcataaaattctcctttctgtttatcatagtttaaatagtaattgtaaagtgtgcgacgagcgtcaggcaatgttagaagcagctaaagactttgcacgcaaacatggaatagacatagattctttgatcgaaaattgtgaagattctaattaagtttttccaatctgcactttcttgattgtgggtacggcttgattttctccgtccttcatgtacgtatactacgaaccgttccaaagttcataaaaccaggggctgtaactaccgagtattcgtgacttccgcacgcaaaacaatggttctgatataaaaatcttctttcgcacactcgtgtacgaaacctatctcttatattactgatatattgagcatcctttgtatgaggatgctttttattttgacacaactttgacacaaccacgccctgattcccaatataacaagataaacccaagacaagaaaaaagcccacaaaatggggcttcttaacacatcataaacctataataatcaaataaactttttcataatacatgccaggtaaccggcagccggttacctggcatcctccctttttacggggatttttaatatctgtttttattcccgctgctcatactgtaaaagccaggatctataaagatgatgtccgcttcattgccttcccggtattataattctgcctttcttgtctttcccttttgtaccgtcttatcaagagttaccgcaagtatcagtaccagccctttaacgactttctgccagtattctgagacatccatcaataccataccgttagataacgttcccatcagaagcacccctgttacgactccggtgattttcccttctcctccgctgatgcttatgccgcctaatacacatccggtgatgacatccatctcgtaaccttccccggaggctgcctgtcctgaattcacccgtgccatcagcatcagtcccgcaagggcatacagagcgccggccagaatgtatactttatacaacactctttttacattgatcccagaaagtctggcagcctcaatgtttccgccgatgccatatacagaacgtccgaacggaagcctgttgagaaaaatatatcctgcaataaatgttgctatcataatgagaaccggtatcggcacaactcctatatatccctgcccgatcagcagaaaacttttcgttatgccatatacgggaaagccgccgcataaaagaaaggctgccccgcgcagcgcggtcatagtgcctaatgtcataatgatcggcgcgatacctacctcattgataaagaaggcattgaacgcgccagccgccgcccctaccagcaggatagcaattattacagcgggtatcggaatccccttcgacagcatcaatgcccctgccacagctgcaacgccgataacagatccgacagacagatccatcccccctgttaaaatcacaaaagtcatcccaaccgaacagacacctacgatagagacctgcctcaatatattaaagatgttggatgtctttaaaaatgttggttcacacaccgcaaaaataatgatcaaagctatccaggcaaataggattccgtactttgataagtccaattttctctttttcatgtcaattcctccacacttggctcctgaccgattcccgacgccaatgacataatatactcctgggaaaattccttcttctccatgctcccgcttatacggccctcatgcaatacgataatcctgtctgccatccctattagttccggcatgtcagaacttatcatgataacgacttttccctggcttaccagctccagcatcagtttatatatttcctgctttgcacccacatcgatgccccgcgtcggttcatcaaaaataagtaccttgctgtctgtaaacatccatttggcgagaacaactttctgctggttgccgccgcttagattgcctgccagctgatctacggacggcgtcttgatctcaagcgcatccacatacttttgtgccacagaacggtccgttttttcatggatcataccgttttttaatattcctttaaaattggcaaatgaaatattatgccggatactctctttaagcagaagcccctgacgtttcctgtcttccggtatgagaccgattcctgcccggatagcatccatcggttttttgactttaacctctctgccgtcgatcaggaactgtccgcttctccttttatccgcgccaaacaaagctcttaccacttctgtccttccagctcccacaagacctgccagccctaatatttctcctgcatacgcctcaatattgatatccttcaaaagctccgtatttagatttttaatttccagaactttatttgatctctggtattctttcgacgggtactgctgtccgagatctcggttgaccattatttttatcagttcgtccgtcgtggtctctgcaacatccagtgtctttatgtactggccgtccctgaatactgatacccggtcgcagatctcaaaaatttcttccatccggtgggaaatataaatgatcgttatcttctgctctttcagcttttttatgatctggaacaaatgggccacttcattttccgtaagaggtgcagacggctcgtccatgatcaacactttcgcattacaggaaacggcttttgcgatctccacgatctgctgatatcccacgcttaagtctttcacaagcgtttgaggcctgacagctacgccaagctggtcaagtacggcctgggtatcctcttcaagctttctgtaatccaccatgtgatgctttagcggataacgcccataatagacgttctccgctaccgacagcgccggaaacagattgaattcctgatatattgccgcaataccgagcttcatagatatttccggggaattattctttacctctgcgccgtcatatattacggttccttctgtcggcttcagagccccggttataatctttataaatgtagatttccccgcgccgttttctcctgcgatcgcatgaacttcgcctggcttaaaggataaagttaccttgtcaagtgcccggacacccgggaagacttttgtgatattttttaattccaagataaactcactcattacgcgtctctcctgtcgtactgctcttcctgtcttttacctgcccatcacatcttttacattatccatcgtaaccggtgtaaagctcacatatatcggatcagctaccttgccttcttttaatactttttctacagactggcagagtaattcgccctggttataagctcctatgtcaacggttccttttaaaattgtatcctgtgaaatatattccaggttcttttcatctgcgtcttgtccggtgatacaaacttttgcgtcacttttgccagctgataccatagcctcatacgcacccagggcaaccgaatcgttagagcatacaataacattcaagtccggatgcttcgcaagtgttgtctccactgcctccatcccggattccgtcgtgttgccggactgtaccgcaactgtctctgcgtcaggcgcgagagacgctagcccggccatcattccttctcctcgttcgatcagctgctcgttctccttaacatatacatacataaccttggcgtcttcctgcttatccagattatccaatatccactggcccgcaatctttccattttcaaaaccataatcatagttatttacagcgatccacgcatcggcgccctcaattttctcagaccatgttatgacagggattcctgctgcctgcgcttcttttactgccgcttccggcgcaactgtgtcaaccggacagataacgatacaatccacttcctgcgtgatcagattctcaacagcgtcaacctgcgtcggcgcatctgaatgcccgtctatgacctgcacttccatgtcatatttgtcttgaaaatcttccactccctttacaacacttaggaaataatttatcgtaaggtcctggactataaatccgacttttgtctttccgctctttttatccttcttcgcagtctcctctttcttggaatcagatgaacccggttcttttgcagtgcatgcagataccgatactaaagctatcaccataacaagaactacacttaatcttttgaacacctttgatttcataacctttcctcctctaattgtcttttctgccttctcctaaatacagtttcagcattctttcgattgctttgtcccagacatcccactcatggatacccggccactcctcataacaaaattcctttaattttgcctgacagattttcttcagcttctcagtctggggatataaaaaatcctctgttccacagaccatatataccttcgggaattcacagccttcctgcggcccttcttcaagtatgtgaggtatgagatattcttccggcacatattccctccttcctgttatcgggaatatctctctgtcgattcctttcaaaagctcgggggcatcgtcctgccgggataaccgtatgatctcattcatatcgtatgccccggaaaatgccccgcagtatccgtaagtttccggcgcctttaatgcacattttaaggctccatatccgcccatagacagccctgcgatcagcatatcttctctcgaagtcgacagatgaaataaatgttccaatatgagcggcagttcttccgttatataagaaaatgcctgcacaccgccagccatatcaaaataccagcttctttgaacctccggtatgactactgccaggttatatctctccgcatatcgttcgatcgacgtacgtctcgcccatgttgacgcattatctgaaagcccgtgaagaagcactaatgtcttaggatctgtatcccatatatatctccggccatcctgcggtaaaataacgtgcagctgcgtatcttgaagcaattttgccgaatatatatttcctgtgaagtatgccatcttgttcctcctctctttagtattttacttatgtattacagttatatattatggatgaattataccaccctgcatatgttatgtcaatactattccatgcataagtttcttaacgttttgtctgcttgacacaaataaaattcatatctataatgaactaagaaatataaagttatatatattgcttataattaagtttcactattaattaaaattgatagatgagcgcagaactcttttcaaaggggaaaacatatgtctaataatattgatctaaaaagaaacaaccagaataaagtctaccagtatatttatatgaacggcggtcccgtctccaaatatgacctgatcgagcagctggatctgagtcttccaacggtgaaccttatattaaaatatctgtccgagaaccattacatctacgactgcggaacattcgggtcccagggcggacggcctcccaaagcctttacttacaatccgcacctttattactctatcggacttgatatcacaagacaccacgtgcatatggtaatgatcgatctgagcggaaatatcgtcgagaagacccgggtaaaaatagattttattccggaagaatcttattatatgtcacttcacgataaaatcagtgaaatgaccgccagatcgggtattgacagggagaagatcttaagcgtcggtatcgccctccccgtcatggtcaatgtagaacagcagactgttctgcacggcagtcttactgagttcaataatgtgacccctgagaccttttcccggtatctcggatttccgtgccttatctgcaatgacgccaatgccggcggactggcagagagctggaacataaaggatatacggaattcattttacctctctttaaataacacggttggcggcgctattttacagaacaaccggctttactttggcgagacttatgaaagcggagaaataggccatgttactttaataaatgacgggcgtctgtgttactgcggcaaaaaaggatgtgtggatgcttatatatcagcccttattctttccaacagcgccgacggaagcctggataagttctttgaatatgtgaaagaaaagagtccttatcacttaaatatatggaatgaatatctggaatacctcgctatcactgtaaataatcttaaaatgctctttgactgctctattattgtaggcggatatgtagggccttatctggaagattttgaggatattatcagggaaaaactgatagaacgaaatacgtaccacgaggaagctgaatatttccgtatctgccgttttaaaagatatgctaccgcggtaggcgctgctttattgaacgtagaaaattttcttaaaacagtctgacagctgattcctctgtaaactaacgttctcagatcaaatcatacatgatacatgccaggaaccggccgccggtttcctggcatcttccctttacagggtcatctgactgatctgtcatacgggagttctcttgtgcagcgccggttccccgtcccggtcatttttttcttctccgcttcttgtataccgcaatgcccgcggcacttccggccgccgcggccgataaaaggaagaccgtacgttttttcacgctgccgtgatccgtctttcctgccgcttcccctgtacttctctgttcaggtacaagcctttgtctgaccggatttataattttatcaagtatggtttccttcttcacaaccttaaatcccacgtctgtctcagcgcggtttccggccctgtcacacgctctgacaagcacgatatgttctccatattcctgaaccgtatactgatagactttactgcgcggatttaccgcctgcttttctccgtctaaccatatcccttctatcgtatcgttgccatcttttactgtcactttaaaggtacactcttcctcgtacgtttctccttctttcacatcttcaaaaagtatctcaggaggagtcctgtctatcagaaaccgtgcctgggccgccgcctcattccccgccgcgtctacggccttgatcctgagtgtgtgcactccctcagtcttcacttttttccccggggtatagatttttccgtccagtcttatctcgtagacatacgatgtaaagtctttgatcgcttcttccatcggatgctcccactgaaattctctcatgacacggttgtccagttcatctacataccggatgacaggattctttttgtctatgatgatctgtgccgtctggctcctggaaaatccggccttatccgaagccgtgagctccattttatatattccgtcctcgctcagctgccggcgcatgtcactgactcttccatcgctctcccatttatttcccgtcagttcctcgagttccccctcaggactctccctgactatctttgcggaagcagaacttaacacgttgtcatcctccgcctggaaatgaacctctgccggacggctcgttatcatataattgtcaataccctggatggcggtttccgggggcgtgccgtcaatataaagcttcctcgtcacttccttcttgtttccagctctgtcagcaacagcaactgtgacggaaactccatttcccttaacggatgtctggctgatctggaacgctgcctgagagttggaagtcgtgccgagcagctgtttaccggcatatactgatatctgctccacctgacttcctttgtccccgtcatctccttttacgttgagcataacctgtttctggtaccatgcatccagtccccgcggcgcccgaagctgaatatcaggcggcgccgtatctatatacaactctttactgtattcggaatcctctgcctgtactccctcttcatcttccatccagacatatatgctgttgccgccgtccttaaactgatccggcccgatacagacccggtctccgctttctttcagctctccctcagccgtaccgccttcactgtccgtaaaacggtactttgtgattccatactcacttacgtggatgatctctatcttgggagctgttacataatatccgttctttccgtctggagcgggacatttaaactcatacttttccaccggcctgtccggtctctccggaggttcgggtccgtccggttcttccggctcttttggtccgtccggttcctccggctctattgttccttctgtcccgtccttatcctctgtctccaaaacgctctctggctccttatccgtatctaccgccagactctttgacacttgtgtgtatccaatgaccatcactgtaagcattattatgatcacaactgttatctctcttatcttccgacccatacttcttccccttccaccctgatatcatattctctctgcaacttcttgaactcttccagcccagtcagctttggcatactctttatgtattctctaattgtctcctcgcatacttctcttccaaccgaagtgtccatgcactgcaggcgcatatataaaagccggagttttgcggattcctgcagctcatcgataccttttctgcagcactcccaggctttctcccgatcacctgcgccttcccacattagcgtcattttcatgtacagctcctctcttttctcattcccgtcctcatgttcaagtaccttttcatacatggaagcagcttccctctttttatccattccttcataggacaccgccacagcttccattatttctttatccgcttctttggctccccccttctcaccgccaagtctgagatatatttctcccagcctcacgatttcctcacccgcttcttctgtatccagtaatgtataaccttttatcaatcccttaaggcacacctcttctctgccggccggtatatttttctccgcgcgtatgagcgcctcctttagtttccggctctccgcggcagccgtatctttttccagacttcttgcaatggcggcgtagcagtctgcgccgtaccggcttatctcttcaagatatccggccgctttagcgtattcttcaagctccagaagacagaccatacccatgtcaaatttcaaaaggtcaccgtcatcagcctcttctttttcctctttacctctgggggaagcgtcactgacgccggcgttctgccgcccggcgccggcaaagccgccggaatagacctttgcttttatcaccgcagccgcgagcattaaaatcactgccgctgcgagcactttacttcgtctttggaactgtgtttttttcattctttctgctggaaaatgtttttgaatttcttcgactttttgatatgcatgttttgactgtctgttcagacatctggaaatgatttttcttaacttttgttcttctctttttgtgagcggaggatcaggctccgtgaccgccagtatatactgccatgttcttccaaggccatatatgtcaagcgcttcactcgctttacggtatatatgctctttgggcggcagaaaattttcccgcacagcctttctctgcatctttcttataaggatctcgctggactttgctcccgcatcgagcaggtacagtttctcttcactgcttacgataacgctgtacggattgacatactgatagcacggcctgccccgcagcctgtgaaacagggccagctgcctcataatctcgtacatccacgaaaacagttgtttctttgggacattgggatgatacttcagccattgaatcagaacactgccctgtacgaattctgaactgacataacaggagcggttatgctcaatgaggcgaagtacatcaaagccctctgatgccataaaaccacctcttttattcttcttttgctttacttggaatgatccggcaatatccggctggaaatgaaaatgttgaataagaatactcagatactttagagtgatatatatgataactgattccgggcaaaaacacaagccccccttttctatttttatttctgtctcagtaaacaaaaaagaggagcctccggctcctcccctgaaagtttctctatctccttaccagctctatcggacggtaaagatgcctcggaattccatctaccatgaccggtgacacatcaccctgaatcaatggtctgacatatgagataaattcgtttgtgacatatgtgccctccttgttcacccattctctcggaacaagcttctcatcgttcgctatcttgtgcacatcctttacttctgttccgcactggtacgggtcgtcggacaatctctgaagtacgaccattttccctgagtctccttcatcagctgcttttacagccgcgcctcccacctgataggcctccagtatatccacgcgggacgctgcatgtgacgcagagcgctgcagtgtactgagctcgatggcacgcgtcttgcagccgagctcgccggcaatgtaattggcaagaaacgcagctgtcccggacagctgcttgtggccgaacgcgtctacaaagtctacgctgttgccaagttcgcatacatacttgccctctccggttctgatcccttctgacaatgccacaacaacagacggctttttcgccaacagctttttcactctctcaccgaacttgcggatgtcaaacggcagctccggcagataaataagatccggcccttcgcagtcttctccttcggatagtgctgccgcgccggtcagccaccctgcattgcggcccatgatctctacgatcgtaaccagccctttattatactcaagacagaagctgtctcttatgatctctttcatggaagtaccgatatactttgcagcacttccgtatcccggcgtgtggtctgtcagtgccaggtcattgtctatcgtcttcgggcagccgacgaatctggtcggatgtccggtaatgatggcgtagtcagacagcttcttgatcgtgtccatggagtcattaccgccgatatagataaacgcttctatctccagcttgtcaagaatggaaaatatcttttcatacacttccctgtcctcgtgtatctccggcagtttgaatctgcaggaacctaaaaatgcggccggcgttctctttaacagttctgcgtccagctctgtcttgatgtggtccgccagatcaatgtaacgctcttccaacagtccctgtattccgtgaagcatcccgtatactttctttgctccccggtcctttgccgtgcggtacacaccggcaaggcttgaattaatggccgccgtgggccctcctgattgtcctacaataacatttttctccataactggctcccttcctttactctgttctgaggtcgataagactattttagtatatttccacagaattgtctataaaaatgaagttttcttaggcacattaacagtcgccactatgtcaattcccgtatctgctatattctccgccacgatatcccctatatacaccggggcagcggccgtgattcctttcagctgtcttgcgcattccatcagcttttctttcggtatttccttctccgtcttcacggacacacgcgggagctcccctccggtcacatccaccgtagaggtaagcatccgtgtcggattctgtacttctgtctgtgcgtacgcataaccgcgcatgcacatattaccggtgacatccaccacctctttatcctctgtctgcaccttcagggcgcagccatttggacagatgatgcaggtcatctctattgtctccatgctcttacgtctccttctatatattccgccgcatatctgccggcttctgccgcctcctgtgacacgttatccacaaggtcatggacatgcagtacattgccgcacgcaaacacaccggaaaccgtcgtctccagccggccgtccacttccggaccgtttgtacgttcattcatggcggctcccattccccttgtcagttcgttctccggaatgagcccgaccgacagaagcagtgcgtcgcatctgtattcttcctctgtccccggtatgggctttttatgcgcgtccaccctggcaagcgtcacgccttctatatgttctttccctttgatgtctacaaccgtatggcttaactttaacggtatattataatcctccagacactgtacaatgttccgcttcagtccgcccgactcaggcatgatctcggctaccgccttcaccacggctccttccagcgtcattctccttgccatgatcagaccgatgtctccagaaccaaggatgacgatctctttgcccggcatatatccttccatattcacaagccgctgtgccgtgccggccgtatagatacctgccggccggtaccccggtacattcagggcgccgcggggacgttccctgcagcccatggcgaggatgaccgccctggcccggatatgaatcatgccgtcccggctgttcattgctgtgactatcttcattccgtcttcctgcacctctatattcatcaccatcgtttgaagctggtattccattttctgttcgatgattttttcaatataccggtatgcgtattcaggaccagtcaattcttctttaaatgtgtgtagtccgaacccgttgtggatacactggtttaaaatcccgcccaattccctgtctctctccagtatcagtatacttccgcccccatgctcctttgcagacagagctgccgcaagccctgccgggccgccgccgattatcacgatgtcatactcctgcattcatgctcctcctacaattcttctttgtctctgcccgcaagcatcctggaagccccacctgactttgttatgtccagcagactcactcccagttcacgcgccagtatctccatcactttaggggcgcagaagccgctctggcagcgccccattccggcccgcgtacggcgtttgaccccgtccatcgtcctggcgccgaccggccgtctgaccgcatccagaatctctccctctgtgatcatctcacagcggcagatgatattgccgtacgccggctctttgcgcatgagctcgtttctttcttcctccggcagcgcgccgggccgcacaataccctgccgcctcgagataaaacggtcttttttgtgcagcgcaagacgtttggcggtcatcccggccagcatctcaccgatggcgggacaacttgtaagcccgggcgacgcgattcccgcacagtcaaaaaagtatggtcctgattcctgtatgataaaatcccgcccgctctcatgggccctaagtcccgcaaatgatgtgatcacctggtcgagcggaacacctgtcacggcctgggcgcactttctgcgtacttcttccagccctgccgcagttgtattcgtgccctctttatcctcaatatccagcgctgtcggacccgccataagatttccatgtaccgtaggagtgaccagcactccttttccgtattttcccggcacggtaaatatcgtccggctcacatgggcgcctgccggcttatccatcagcatgtattccccttttctcggcgtaatgtggatctgatcctcacagaccatgttgtggaatacatctgcatagacccccgccgcgtttatgactgccctcgtctcataagttctgccgcctgcggttatctcatacccgccttccgttctttttatatcgctcacctcagcgccaaacttaaattcgaccccatttacgcacgcattctctgccagcgctatattgagttcaaacggacagacgatcccgccggtgggagcatacagcgctgctgccgcatctttggttatattgggttctaatcggcgcgcttcctctccggtaagaagtttaaggcccggcactttgttctgccgcccgttctcgtacagccgcttcagtttttctctgtcctgctcctctgtacacacaacgacagagccgttgcgcacgaacggtatatccagcttgccggccagcgtttccatcaattcattgccgcgcacattaagctttgcctttaatgtgccgggaaccgcgtcataccccgcatgtacgataccgctgtttgctttagatgtcccgcagcagacatcttcctcccgctcaaatacgcagaactttccttcatatgcggacaattctctcgctgtcgcgcagccggacactccggctcctatgatcactgcatcatacatcagtccacgccttcctctccctcatcttttgcccagtcatatgcgtaagtaaccgctttattccatcctttgatcctcttgctcctctccgcctcggttatgtgaggttcaaacgttttgtctatcgcccagtttttgatcacgtcttctttattttcccaatatccgaccgcaagtcccgcaagatatgcggctcccatggccgtcgtctccacacactggggccggctgacaggcgcggcgcttaagtctgcctgcgtctgcatgagaaaatcattggcgctcgcgccgccgtctgccttcagtgtacttaagtggatcccggaatcggcctccattgccttcagcacgtcgtttacctgatatgccagagactcaagcgtagcccggattatgtggtacttgttcacgcctcttgtaagcccggctatcatacctcttgcatactggtcccaatggggcgccccaaggcctgtaaaagcaggtacaacgtagcatccgtttgtatccggcacttttttggccatgtattcagagtccgccgcagaatcgatcaggcggagttcatcgcgcagccactgaatggcggccccggccacaaatatggaaccttccagcgcgtaacagaccttaccgtccaatccccatgcaatcgttgtcaccagcccgttctctgagaacaccggtttctcccccgtgttcataagtagaaaacagccggtcccatatgtattcttcgcctctcccggcagaaagcatgtctgcccgaacagtgcggactgctggtctccggccgcgcctcctatcggcactgcccctccgaaaaatgaggcgtccgcctccccgtatatacagcttgacggttttacttccggcagcatacactccggaattccgatcagttccaggatctccctgtcccattcaagcgtattgatgttgaacagcatcgttctggatgcattggaataatctgtcacatgcacccttccctttgtgagcttccatataagccacgtctccacagtgccgaacagcagctcgccgcgcccggccctctctctggccccttctacatggtccaggatccatttgatctttgtggcagaaaagtaagcgtctattttcagccccgtcttcttccggaagaattcctccagtccctgttttttcaggctgtcacagtattccgccgtccgtcggcactgccagacgaccgcatggtacaccggctctccggtaaccttatcccacacgattacagtctccctctggtttgtaattccgatcgccgcaatatctcctgcttcagccccgatcttactcatggcttccaccgccaccccaagctgtgtggaccatatctcatctgcatcgtgctctacccagcccggcttcgggaaatactgggtgaattccttctgggctacactgcatatccggcccttttcgtcaaacagaatgcagcggttgctcgttgtccctgcatccagtgccattacgtactttgccatataatcacctctcataagtcttactgcctgtatccatatgcagattataccacaaccggactgcttactcattataattttaccgtctgccccttaagagttgtcctcattggtccgcttcttcctgtttttccagacggctgccagtatatctttgagtacgagaaaagcgttcaaatcatcatatccatatttcttttccaggtcacagatcaatctgcacagctctgaggcataataggatacctccacttcgttctgataccggccgaggatcggatattttttactccacgcctttgtccagtcgatcttatccgttacttcgtcactcgtcctctcgatcacttcctggatctcctttacgtcaatgtcaaattcgatcagttcatctaatgttaaaccatacaaaaccgcaagttttttggactgctgaatatcgggtaaagtttcatctgtttcccactttgaaatagtctgtctgcttactcctaatttttcagcggtcatttcctgtgacaatccttttgcctttcttgcgttaaacaagttatttcctaagctcatggtggatcctcctttatgttttatctgtttttattataatgcgtctgctcgaggcgttctaccaataccattatgcagttctgcacgttttattaaccactttgctcctccggcagcgaagggcgccggcgcgccggtaacatcctccctgcacgcctgtcattaagtcagcagtaagcccgcacttctgatttagaaaatgcgggcttccatttagttattctgccggcgtgagtgagccaccgccgtttagttcgatcgtctctgcgttcagccatccattcttactgtctgaggcatcatagtatatcgtgtggccgttggaaacgatattttttaaatctttatccttgtccgtgaacgaggtcacgtaagagtctccggtaacttcccacttagaatcctgactcagtgtaatgcgcacttctttccccgtattctctccatttgccattccccttaagatactcgactctgtgaggcttatatccaccgtactgatctcatcacatgtcacatcgccgtccaactcctggtttatgcctttcagcttaatatttccgccgttttcaccttcttttccccagttattcgtattatttcctgaagcttttataagaactccgctgttgtacgtcagctttgtattttccagtgtcgcctcggcgtctgtatttgttatatagaacattggccctgtagacgcagaagtaaggactgaatctgtcgctgtgaaccgggccgttccctcttcggcatcgcctgatgtgctctgatagagcatcactccgttttctccggcgcctgtaagttcactttcctccagcgtaatggagttcttgccttccacgacggccgcctggctcccggccgctgtcccggtcacaccttttaccgtaatgttgccggtggaataaacacacgggcttccttcccccgctgcggataatttgccgctgtcaaccgtgatcgtcccttccccgcggtctgtggcgaccggcgcgcagtgatctccttctgtagtgatgtcaacattggtcgctatcacactgccgccatatgtggcgtccagccctctggatgaatttccttttgtatggatctttatattatttgctgtgatctttgaatcttctcctgtggcaaagatggcattggaaccttcggaatcagaggtcagtgtgatatcgctgacggttgcagtgcttcctccggccgcagccaaaactgcatttaccgcataaaaattactctcgtccgcgctgctgctgccgccggacttattgagcacagcattcgtgagttcaagaaatcctccgttttttacgaggaccgcattttcgtccgcggcctcagagttgtatgtctcgccgtctgacatctcttcttttccgtctaccgtatacactccggaaagctccacggtaccttccgctgaacctgacaaagcaccgccgtccatacttctgagcgtaatacttattacgttttctccctgcatctcaacggttacgatatctccttctgtcaggtcatccagcgatgcctccgtcgtttccggctgcccggcgccttcttttttggagccctcatcactatctgcgtccgattcctttttgccctcactgttttctccgccctgcggcgcagcaggcattccgcttatcttttctacctttgtctcatcatctgccgttatcgtcttctcttctcccgtcaaagtgatgccgccgggaccgcccttgggcatgtcacttccgccgggagcttcgccgtccgggacctcaccttttgccgcaccgccgccatcatccgcctcttcgtcggaagcggtctccccctccggtttttcaggcggcgtttcttcctttcccgatgccgcgccttctgccggcgcttttccaccgtcaggtgcctccccgtccggtttaccttcttccggagcctcacccgcctcaggcgcctccccaagtgccagcgtgatgttgcttccgtctatctccgtaatttccccatacaatgtctctgtcttttcttctgcgcttcccttctggcatccagacacggccatagccgtcaggagtgtccctgccagaacacagacaacgcctctcttcatatcgttcaccctttctgccgcagctgtcatcgtgtatcggcacggtattgccgtccgtcatgtcacgggcagcaccgcactgcgtaaattcaacatttactatatacggataatttggtaaaaatatgatgatactgtgttttttctgtgttcggatgcgcaataaagttctgtattatccccgcagtgttgcgatgagccgcttgtggttcagcatcagttcaagtccttcttcaatggagcggacacatacatccacctctctgatcagcttgccgcacattccttccgaatccatcactgcgatggacaaagcagccatcctgcacatgagctggtcatttcttccgtttcccatgcaggcacagttctctcttcccagagattccacgatggcgtcctttgctgccatcgcgttgccggatggaaaggtctctatctttacgggcaggccttcgcactcttccatggcgcttccataagtatcggccgtcagtacatagacctccagctcttttgataaagctttcagctgttcccgcaccccctggggaatctttccgtccaccgcgatcgttccattgtaatcaagcaccagatatttcagatccaatattttgtaatcgggaatatctatcttcattgttttacctccttatgttatgtcataatcaaccgttttcctaacattttacagtatttcctgtttaaatccaatacattttcattatctggacaactttattttgcggcacgtatgtgctttgacactttcaatgaaatccgctatattatactatggcaaatgtaagaaaaaccagcataaagctggtatgaaccggaggtatcaattatgaatttaaattcactcgctctgcttcagcagatgaaaaatcaaataggaaaatttaaaacgagacatccgaaattcccattgtttttgaatgcagtttctgagaatgcacttctggagggaactgtcatagagatcaccgtggccgcacccggcgggcagaattatacttcaaatataaaactgatgccggaggatattgaattgatccagactctgaaaaaaatggatcaaattaactgactttttccgaaatttccataggggtcagacccctttcaacgcaggggtctgacccctatggaaatttcctcctcatggcccgaattttttcttttgtttctcttgacacctgtcttgattcgcatatcttctgaagtgccttattatatgtaaaatcattcaaaaccgtatcgctcagaaatgcctctgtgcgggaaggatcgtatacatagtacatggacacggcccaggctgcggccatctttacataatatgatccgttctgtatcttttctatggaccggagcgcctgtttgatatgtgtatcgtctatataataatttatgagcatcactacagcaaagcggatatcgtacgtccgctctgacgtaaggtatccctgaatgtagtcccacatttcctccgggtattcttttgttatcttaaggccggcgcagaagctgtcacatacagaccagttatctatctttggcagaaaatggtctgtccatgctttgatttcctggatatcggctttcgcataaccgatgaccattccctgaagcatgatctcttcaaagctttcatctgaagccgtccgaagatagccgcgccagtcttcttttgccagctgttttgccagtctgcgaagctttggcaggcggacgccgatgagatgctccgcgggcatctctggtatgagagaacttgcaaatttttgaaattctggttctgccatctcccccagaatttttctgatttctttgttatccatcgttctatcctgctttctctgtctcaatccgtttggccctgagctttccataccatgataaactctttttccttcgtattttcatcgacagtttctgactttattcggaacctctcgcgctcgtaaaagcggaccgccctcttattcttctcatagacagtcagcgtcagcgactgccttatcttcttgacatgcgccatgagcgcactgccgatccctgcggactgcgcggtgctgctcacaaagatacctcccacatcatttccgcaaagccctataaagcccctgatctctccgccaatgtcctcttcccatacgtatacttctgcctttgatatcatatccctaacagactggacattatcctcccagtaactttgtgaaataaaattgtgagccctcatattggtatccagccagatttccattaccacatctaaatcttctgccttcattttccgtattgtatgctctgctgtcattttcttttcctgaataatgcgataatgagctgtatgaccaacagtggcgttacgataaagcaaaacccgcacagcacccgaagtgtaaaactaagtccggagtctcccagcagtccaaagcctatacttgccgccagagcgctgaatataaatgtcacaatgctcagaataatgataccgcttttttctttcattccctattcccttccttctctctttattgctgcagttgtgtcttaattcctattatagcaaaatgacgtacaaatgtataatcaaacaaagagtctggttaaaaccagactcctgcacatgacggcctttacgtatacgcgaactttggattctttctcatctcccgctatttaataaaaaatcccgctgttttcatatttttatcaaatgaaatcgtaaactggacttttcgttcctcatacttcgccttcactacgaccactgcaaactcctgctccgtatccttatcctctcccccggccaccgcctcattttcaaagctctgaaacgcacctagttcttctatgacaggctggatctcttctgacattttctctgccggaagtgctgttttgagctgggcattccatttttcttccgtcagtttctcatactctcctgcatttaccagatcgatgacctcttccgcagcctttttcacttcattttcatcgaaatcatccggcagctcctgactcctggaacagcctgtaataccgcctatcaacagcaacacacctaatgccgcacaaaatttcttcatctcattgcctcctctgtctttttactatctgttctcaatgctgctttcattccttccccggcgcagcttccggacgtggaatcgtgatacttaccgtaaacacactgtctccttcctcaatgtccatcccccctccgtaacgcttaagcgtctgttttacattgccaagtccgagccctctatgtcccgaatcggccctgttccttttgccgttctgtgctggatcatatgtattacatattttcacaacgttaaagtcacgaaaggcatccgcctttacggatatgtatttcctccccccggactgctccgccgcttccagcgcattgtccagaagattggcaaacaccgtcgttacatccatatccttcatatgccgaagctccactgcccctatcctgacctccatgtcaatgtctctctgccgtgcggtctctgctttgtcatttagaataatgttcagcatatggcagtctgtatacagccgctgtccgaaacggtccagcattctgtgcatatcctttgcgtacgcattgcctgcttcactttcattcatatgatagagcgcctctattgactgaagatgattgcgcatatcatggataagcttcctcgacgactcgtacttctgctcgatcctttcataatagcggtactgcatctcactctgtctctggaacagcctcagttcttccctgagcttccggttcctggactggtaagaaaataaatacagtaatgaaataatttgagagaaaatctcacaacagaataaaatgcttggaaatattgaaaagttcgctgaaaatcaaggtttgcagacatttttcttcaaagaaaaggtatcgtagaataccgcaaaatatcgtaacagtttttttaaatggagtaaaattggagtaaagattgaaagaaaatggagtaaatatttcaaagatataatgagaaatggcgtaggtagtggaaacattatctgcgtcatttctcatttgtaaaaataggggaggttttattgaatttgtgataaaatagaaaaaacatcttgactctctagtagcgtaacggtttacgatgaaaaggaaaggaggacttatgaaaacagttaaaaaagtatcagaattgactggaatcagcataagaacattacgatattatgatgaaattgatttgttaaaacctgctaaagtaacagaagcaggataccgtttatatgatgaaagctcattgaaaaaattacgtcagattatgttttttcgagaactggaagttccattgtcagaaataaaagcaattatgaaggattctgaaagtgataatcgtaagattcttgaaacacagaaaatgatgctagaaatgaaacggaatcgtttgaatggtattatcgaattgatttctgatgtgttgaaaggagaggacaagatgagttttgaagcgtttcatgaagaggatattcaaaaaataattcagcattctttagaaattatgagtgaagaggacaagaaaatagtaatcgagcattatggagatattgaaaagtttaaagaatctgttgcggaaagctttaaagatgaaaaggcatgtgagcatttaatcaaaatatatggaagtaaagaaaaagcagtagaagcaagcttgaagtcaacaagacagagcagggaagagcttgatgaacaaagaatagaaatgaatgcagtttatgaacagttctctgttgcaatggctcattcagatgaaaaattggcaatgaagtctgtaaaagcactaggggagagttacaaaaatatgttcagggtagagaatccaagagccttgttgttggaagtagccaaagattatttgaatcattctaaactggaagaagctacagataaacagtacggaaaaggggttacaaaatacattggttcagctatatatcggtattatggtgtagaaaacttggaataaacagatgttaccaaaatggaaacaagagaaatacatactggtacttttattttgggttctatcgttatatgatgtgaatgaaagagaggtatggagtatggcattacatgataacatcaaaaaactcagagaagaaaaaaatctcactcaacaacaacttgcagataagttatatgtttcaaggcagacagtttgtcgttgggaaaatggttcaagatgtccggacttgattacggcaaaaaaactggcattagaactagatgtaagtatggacgaacttatatcagatgaagatgtaaatgatattcaagtagattatggaatatggaaatctgaaagaataaaagacaagaagcatttacaggcacttcaaaaaaagatattagactttatacaaattgttggagctgtatttttagcaatcacgattttgctacgagtgcaactagatatgagagtacccgtatggtgtacaatcatttgctttattattgtagcagtagcatttctttgtaatttcatagtttctaaaaagttgagagaaatgtagtgaggtcaaggaacaaggcgaagccgatacgccgtagggcagtccttgacggaacggacacagccaacagaaccatgatacatcagaggacttgaaaggtcagaaaccttgcaagtcctcttgtctgttattgggcgttgtgttttaagtaaagtgcttcttttaccacttctttttcaaatgctttgatatgacaatcatgtacttcattgtcaatatagaagcaatcgtcagtttgtgagtaggcaagtttggtaacttttggttcacaggtctttgtatcaattccataatagtaaatcgtggctgttgttaataccatgtgaatactttcaaaatctcttgtaaaaatggtatgcctgtcagaatagaagaaatcagacggacattcatagaattgggaactatcctctttcaaaaataatggcagtatgtgcattgcatttccagcacgattgacaaggacataaaagcgtggaataagggcggcatattgcgtcatcatggcaatatagatatcgtctaaattatcgagaagatattcggagcaggagttgttataaaagacatattgcagggcattgtcattttggcttgtatgttccataggcacattttgtccgtaaagccaccgcaagtctacatctaaggagtcagcaatcagttccattttatcggctttcggattgtactgtcccgaaagataggaactgaacgcccctttgctgatacctgtatctttgactatatctacctgttttttattttttgctttcatggcaaatttaatccgttctgcgattgtattcatctgaaaaccctctctttccatatcctgttataacttttcatatcttatcgtctaaggacactataccacaagttcagaaaaaagaaaacaaaaagtttataaaaaactaaactttatattgcaaaacgaatatgtctgtgctaatatacaattaagttcagaaataactgaactaaaaacgacgtcgtaaatatgaaaatgaaaatatgagaagctgacctatcggttcaacggggagaaaggaacgtgtatgcagattacattgacaaaagaacaggtaaaagaagcgtttggagaacttcgttttatgggtgcggataactgttaccgctatgataaagacagtaagaagaaaacagaggaagtggaagccttaaaacttcatcttggaagcatgaaacttgggaacagcgtggatattcgcttggaagcaacggaacttccgaagattgagccttatgctgtggtggaactggaagaaccagtatatgctccttatgtgcagagaggaaactttcctgtattagtggagaagattacctgtaagggtatccgccctgttccaaataaaaatatgtaggcggtcaaagttcctgccctcgttctgacgtaccaaacggcaggttgggggcagggcaatggcaacgccattgcaggtaaggaggtttgataaatttggaagaaagaagcggaagttttcttccagaactcccctacactaacaggggagtaatacggcagaaagaagaattaagtgccttgatagattggtgtcagataaccattaaggaagttccgttagaagcagtcatagaagatgtgttgaaaatacctatggaacttatgacggtaacaggctatgaaaaagggattgcagggcatgaggttgtggcaatcttcgataatatcaaggtgctaaagccgacaggaaatgcacagtatcaaggctttcagattttgatgagtgggaaaggctgtcgcaactatgagaattttttacaactcaatgaggaaacatggtttgatttcttgaacagagtttgccagtatcatatcaatgttcctcggattgatttggcgatagacgacagaaaaccgtatttgagtattcccgatttgattgtacggacaaaagagggattgctttccacaaaactaagggagatagattttcacgactcgggagaactgaaagaagaagtgtttcagagtaaaggtggcagtctttatctcggcagttcagccagtaatttgagattggtattttatgaaaagggatatgaacagaataaaaagtatggaacagaattagacgaaaattggaatagatatgagttgagatttcggcaggaaatggcggtaagtgtagtacaggaattattgagatatagagatgtggcaggactggcaatggaagtattgaacagtaaaatacgatttttagaaaagccgacagacagcatgacaacacgaaaaagactttatccaacctatcaagcatgggcggaactgatgaaagatataggcaaggtgaaacttaccatgcaaccacagaagaaaagtttacaaaaggtgtgggagtggttggaaaagtatgttgcaccgtctttgaaactgtttgcagaggttgggaagatagagaaaagagattatatcggcaatcttgtaaaaaatggagaaatgaatattacacagaagcagttgtatgatgattatataaaagcaagaaaattagacgaaagggggtgatcgtatcgaaaaagcattactaaatataaatgaattttgtgagtatatggggattgggaaaacaaaggcaagagaactgttgaacaatccgaaaaatagatttacagtacgcattggtaatcggttgtatgcaaataagaaattacttgatgaatggctggaatatcaatgcaaaagggcttgaaaagaaaatggggtgtggatataatgaaaattgaaatatttactttaccatatttctttcagtagaagaaaggaaagttggtatgggtaaagatttaaagggcaaagaactcggtaagggaatttcacagagagcagacggacgctatattgcaagatttacaagcaaaacagggaaacgaaaaacgctttatgattttaaactgaatgaattaaaacggaagttgcgagaagcggtttatgaagatgaacatggtttgaatggcaatggcgaaagtatcactttaaatgcgtggtatgtaacgtggacggagttgtataagaagaaaacagtcaaaatgactacgatatataaaaaccacagttactacaattcaagagtgaaaaactctatcggaaagatgtatttgcaggacattaaaacatatcacgttcagaaatttttgaatgatttgatagacagcggtcttgcacatggaacggtatcgaatattagatttatgttaagcgatatgtttgataaggcagtattgagtgaatacattagaaaaaatccctgtatcggtgtggaaatgccaaaagaagtgaaaaaggaaaggcgtgtattaacaagagaggaacaggagaaattttttacatttgcttcttcctatatacacatcaatgttctgaaatttgctgtgacaacaggctgtcggattggagaagtgcttggactgaaatgggaagattgtgattttggaaaaagagaaattacaatcaataagacaattcattactcaaaggcttccagtcccgttgagggttcaaagtttttctatacgactgcaaaaaccatatccagtaatcgtgtcattcctatgacagatgaagtgtatgagattttgcaaaatcagaagataaagcagacagaacagaagatgtggaaacgctcgatatggaaacagcataaagaatttcaaaacttggtatttacctgttcggacggttcgccagtttattattacaatgtcaatagtgcaatcaaagactatgtagcgaaaatcaatgtgatagagattgaactggcaaaggaagaaaagagagagccaaagatacttgaattgtttacctgtcacactttgcgacatacatacgctacaaggtgttatgaaaatgaagtagaccaacaggtagtgcagaaactcttaggtcattccacattggcaatgacaaccgatttatacacgcacgtttcagaagaaaagaaaaaagaagaagtagctgaactgaaaatattggcttaaaattggagtaaaaatggagtaaatcagaagatagatagcgaaaaacagcgtaaaatcaacattttcgagtagatataaatattgtatatagagattcatgaacacaaggcagcagatatccacaatgatcaagaatacgccgtacaattgtatatacacgtttcccaggacaaggaaggaagcgataatgaacgcactgataagcggagggagaaagagccccgcaaactgaaaaccagtcacatcctcaaattgtctgcggttcagcagcgccgtccagactcctgtcaaaagcagggcggccggctgcttgatgataagcgctatgttggccgaatagagatcaaaacccggcagtccccactgtgacacaatgaatccgagtacgaggtaaatgataaacaactgcatgaggacaaacgtgaccgggtagagaaaataataaaacaaatacatgcgccggtcattatacatattatgtccgatgagcatagtcgcggcgatcatgaatacaatcgcaggaacattcgcatatgctgtagatcgaaagccgtaagccagcccggtatatcccgcccagaacccgagaaacgccagcgctctgcttcttgccggcttattgatattcccctttgtatgacttgtaaaataccacgtacagactgtgacggacacggtttctgacacagccagaatgatattgcatgcagccgactccataaagcccacctgcgccacctcctgtcataatattttgctgtttatatcagagtatgtgtcatatatattccgcctgcagtctgccaagttttccccggaactgcgtggagcgcttttgtgacagcggtatgatatcaccgttgaccatataaatatcataccctttgatagattttacgtgataaagattcacggtaaagcttttatgcggcgccgcaaatccatacccttccatccgcctggccagttcgcttatcttccccttcagggtatactctccgctttgtgtcaccatgcgtatcttccggcttacatattccatataatatatatcatatacgtccgtctcaaccgtaccgccaaaagccgcaaagcgaagagtccgcttctgttctctctcccgcccgtaggcacacgcctcgacaaactgtcttctgatgtcctcttcactgacaggcttcagaagaaaggaaaacggatggacattaaaagactgcctcatataatcttcataccccgtgacatatatgatcctgacacttcgatccgactttctgattctggatgctgtctccagtccgtccattccgggcatgtcaatatccagaaacagcacatcatagcccgtatacccgtcaagcagttccataccgccggcgaactcacttattccgcactctgttccggaattttctactgctccttggataaacctgcgtatattgaaatcatcgtcacatatcgcaacacggtacatttgttcagccctctcttttcttcctgtctaaattatatagaaaaatagttacaccgacaatatgaatgtcttcaaatacagaattgcgtgcttaagttacagctccctgttgttttgttgcgtctcgaaacctgacatactgttgtcagattacatatgatagaatgggataaaaaaggagatcataaaatggattttataaaagtagatgacactaatattgagaaagaacatatctgctgctgtatcacaaacaaaaaaggagaaaactgcgtttcctcaaaaaaagaatggatgcagggctgtctgaaggacgggcttgtgtttttgaaagcagatgtgaggggaaaagtgttcatcgaatacatgcctgccgaaaatgcctggtatccgatcgacgcgcccggttatatgcacatcaactgtttctggatatccggacagtataagggcaaaggatatgccaaccagcttctggagcagtgcattgaggatgcaaagaaaaaaggaaaatgcggtatcacgataatctcttccgaaaaaaagagaagctttctgccagacccggactatatgaaatataagggatttactgccgcagacactgccagcccttttttcgtcctctattatcttccatttactgacagcgcgcctctgccccggtttaaagaatgcgccaggtcagggaagatagacgagcagggaatggtactgtactacacgaaccaatgtccccatacggccaaatacgctccgcttctcagctccattgccgaacagcacggaacctctgtatcggtccgcaaattagagacagccgcccaggcgcagaacgcaccgtctccttttacaacatacagtttctattacaacggtcagtttgtaacaaatgaaatattcagtgaaaagaaatttgaaaaatttctgcaggcacacggattataacgttcaggtaacagacagtacacgctgcggttcagcagagcttttggatctcctccaggaaccgctcgccgtacttttcatacttatactcacctactccggacacagacagcatgcctgccctgtctgccggtttttccacacacatgtggacgagtgtcttatcggaaaatacgagatacgggggcactttttcttctcttgcgatctccatcctgagctccctcaatttctcaaacataggctcatctgccgcagaaagacctgctgtttttttctttttgccctttgtctctttgtgttttttcgtttctttctctgcctctttaggcattttcatcgtgatctgttcttccccgcctgtgatctgtccggatttttcagtcagcttcacaatactgtagccatctgtcgtcagcatcagatattctttcagcagcagatgattgatgatctgcctcagacggtaaaggggcacttttgccagtacaccgtactgcggattttcatccatcctgtactggcgtatttttgccgtattagcgccgtgtaccgtgtccagtataacattgatgccgtaacgctgacggcacgcggatacacagttaacgacagcggccgcgctctctgtgacatctacagtctcgaactgtgacagacagttgctgcagtttccgcagtaattttccccgtattccccaaaataacgaaggatataatcccgcagacattcatttgtaaagcaatagaatgtcatctttctcagccgctcccggtctctttccttcacaacctctgccgtaaattcatccagctcgtcattctccctgttattgtctataaacagctgattggtcactacatcctgtccgccgtacaaaagtatgcattcggaagcttctccgtctcttcctgctctgccggcctcctgataatagctctccatatttttgggcatattataatgcacgacatatcttacgttggatttgtctattcccatgccaaaagcattggtggccaccataatatctgcccggtcataaataaagtcttcctggtttgacttccgttccccgtcgctgagacctgcatgataccttgtgacggaaaatccttcagcctgcagcctttcacacacatcttccacatatttccgggtcagacagtaaatgatgccgctctctcctttatgccgctctacatagtttaacagcgcggcaaatttatctttcggcgactgcaccgcaaagtacagattcggacggtcaaaacctgtggtcgtgacaagcggctcccggagcctcagtatatctgcgatgtccgctctgacctccgccgttgcggttgcagtaaacgcactcactacgggccgtttcggcagtttctctataaacgtaacgatcttcaggtaactcggcctgaagtcctgcccccactgcgacacacagtgcgcctcatctaccgctaccatggaaatatccgtgtgcattgcaaagtcgaggaattcaccggtatccagccgctccggggccacatagatgatcggatagcggccttcctttgcatagcgcagcgcagtataatactgattcaccgtaagagagctgttcaggtacgcggcatgcacgccggcctgattcaatgcctctacctggtctttcataagcgatataagcggcgagaccacgatcgtaataccgcccataagcagcgcgggtatctggtaacagagagacttgcccgccccggtcggcatgatgcccagcgtgtccctgccctcaagaatactgtcgatcagtacattctgcccatccctgaactcatcgtatccgaaatattgttttaaaacttcgtatttatccattatcgtatcacaaaaccctctgactattctgtccttttattctctctgtatttctttgcctgctcttcccagtacctcttatcgtcttcattgatctcacgcagcaccctgcacgggcaccctgcggctatcacccctgacgggatatcttttgtcacgacggcgccggaacctatcaccacattgtcaccgatacttacgcccggattgatgactgtgctgccgccgatccacacattgtttcctatggacaccttactgccaaattccagctgcgtattgcggattccggcgtcaataggatggcctgcggtatatacgcacacccgcggtccccagaatacattgtcaccgatactcacactgcatacatctacaatgatacagtcataattcgcatagaaattgtcgcctattgagatgtttttgccgtaatcacagcggaacgaaggctcaatgtacagattctcccccgtctttccaaacagctccttcagcagctgtgcacggtactccgcctcttcctccgtcgtattattaaacagtcttgtgagtcttttcgcacgcataaattcttctgtaagttcctcgtcctttgcaatatataattgtcccgacaacatcaattctttctctgtcatattcgccctccatctctgttttatgtattgtctctcttccttctatgaacctgaagacggtaagtacggccttaacacaccggccacattgctgataggcatcgtctgaagccacaccttgcccggacctgtgatgacggtattaaatatcccctctcctccgaacagcatattctttacccccggcacagtcttaatctccatactgcacgtcgccgacattgccgccaggtggcctgtatctaccacgatctgttgtccgggctgaagttcgtattttatcacatggccgtcgaactcggcaaagaccgtaccgtacccacccgccttctgcataataaaaccttctcctccgaacagccctgaactgaactttttattaaaaaatacggacagctccacactagcctcccctgccagaaacgcacttttctgcagtatcatttcctgtccgggccccacctgaaatgcttccacggatccgggaaagcttgacgcaaatgcgatcataccctctccgccctgcgccgtataaatattctggaacatgtgctccccggaaaacatccggccgaacgccttcccgataccgccgttggtcgttgtttccattaacatgttcggggacatccaggccataccgccgccttctgtgatcattttttctccggcctcaagctgacagataactaccggcaacgtctctccctgtatttcgtatttcatattcgcatcctccttttttaccaagtataacataagtgtcacatcattcaagaattctttccgaagatgtgttaaaataacatcatcgtaaaatattatccgcggaggagactttataatgccaaaagaacaggaacagcggcacgtatactacgaccgtgatctaaagatagaagcatacaatttaagcggcatcgtccagaaatttcccaaccattttcatgaattctatgtgatcggttttgtggaaggcggcagccggcacctctggtgcaaagcgcaggagtatgacctgacagcgggggatcttattcttttcaatccccatgacaaccattactgtgcaccgcttggcggtgagattctcgattaccgggctgttaatattcctccggatgtgatggagaaggcagcgtcggaaataacagggaaaaattttattccccattttacgcagaatgttgtgtatcaaagcgacatcacccagtcactcggaagactgtatgacgccatcctgaaaggagggccccgtatggaacgggaggaagcttttttcttccttctccaccaggtgctggaagactacgcagctccttttgacgaggcagagcttatccagcccaaccctcaggtacagatgctgtgcagctatatggatgaacatttctccgaaaatatcactctggacgacctgctcaccatgacaagctttggaaaatcctaccttatacgctcatttacacgccaggtaggtgtctccccttaccgttacctgcagactgtccgccttggacgggctaaaaagtttctggaacaaggtgtcccgcccatcgatgcgtccgatatggcaggattttccgaccagagtcatttcacgaattttttccgggatttcaccgggcttacgcccaaacagtatcaaagaatatttacagattccagacacgccgcttcgcctgaagcagtgcttacgggaacagaccatgatgagagagaggaaccgtaactgacatgacagaaaagaatgtatcacgaggccatctggccgcctttataactatatttatctggggcacgaccttcatttctacaaaggtgctcctgaaaagctttacaccaattgagatcttgtttatccggtttttgatcggctatgccgcactgtggtgcgtacgcccgaaatttatgccgttaaggggccgaaagcaggaaggaatctttctccttgcaggcctgtgcggcatctgtctctattaccttctggagaatatatccctgacgtttacccaggcatccaatgtgggcgttatcatctcaacagcccctttcttcacagcaatacttacgaaacttgtctccagggaaaaggagcagctcggcctccccttctttctcggattcatagctgccatggccgggatctgcctgatcagcttttctgacggcggggcgagcctgaatccgaccggggatctcctcgcgctgctggccgcttttatctgggcctgttactctgtgctgacaaaaaagatctctggttacggatactctacaattgaaactacaagaagagtttttttctacggcatcatgtttatggtacctgtcatgttcttctccggcttccgccctgacatgaaagcactgctcgtcccggtcaatctcggaaacatactcttccttggccttggcgcctcagcgctatgctttgtgacatggaacgctgccgttcgcatcctcggtgcagtgaaaacgagcgtctatatctatcttgttcctgtcatcaccgtgacagcctccgtactcatcctgaaggagcagatcactttaaaagcctgcattggtatgctgctgactctggcaggcctttggatatcagagcataaatgggaatataaaagaaagagtccctgttatacaattaacaagtagcgtcagcaaaacggtaaataatccgaccggcgcaggacaggtggcagatgtaaagttcaatcttgcacatccaagccggccacctgttcctcctgcgtatgtttcatttattccagttccatttcttttataagtttctctattttgtctgtaccttcttcaagggcatcagcgatctcttcgacggattttcccttttcaagtttctttttgatcaactctattaattgttttttcgctccttgctccagtccttgctccagtccctgttccagtcctttttctaaacctttttctaagccctcctgtagtccttcccgcagtccttcctttcttgcctcttctttttcatagtatttttcttcccaagcctgcatatatttcaccccgacttcctcactgtttcttaccttccggacccggtcatgaatacgctttatccgctcacttcctgtctgctcagccgcctcgtccgtcgtatgctccacatagtacagaaactgtacgagctccgccggaacttcgtcctcattcttcccccgggtattcagaaatatccgtgtcgccccatcttcaagaacgcacttgggctcctccacacacacggaacgaaaggtgtaacgatatttcccgaagccaaacagatcaaagggagttatcataataatatatgactcattcaacgcactgtaatccggaaccccaggttccagcagggagatatcgaccagcgactggtaatacctgctcctcttagacaggtctgccctgcgctgcttctgcatctctgtgttataaactgtcttttctacatccatggaaaagacatccatccggatggagcgggcctccggcgagatcctcagttctttttctgcctcattttgttccagaagcggtatctctctgccgaagataatgctcagcgcctccctgtgcgtcagcggatcttccatcacttcctcaaacagaaaacggtccgtaaggtttaagttatttaatggtatcagttgttgtcttttgttcatatgactctcctttattttatcatagatcaccggcagttaacagacaaaaagcgcaagaacaacgcacacaggcatccctccttcatatttagatttgacacaaacatcggatacgtacggcgaactgccgctaatgaaatcagaacttcagaatgtttgatttgtgctcatatggtaccacaacacaatgatctgttcaagtggtttcgtaattttattacgtgaattcaaaatattacagtgtatggcgaaaaggagagagaatagaaaagctgccggcttatacgctcctattctttcacctctgcgcctgatatattacaatgtatgatcaccagcttaaactgctgccgctctacatttgtttcaatgcttcgaccatattaatgtgtggtatcttcctcgatacgaccctgctgaccacaaaggataatgcaagcgtccccgcagcgcttaagctccacgatgcagcccttataaatacaggtacatccatggattcagggatagtggataacaggtaatacagcaggccgtatcccgcgggcatcccaagcaggattcccagcgccgaaagccatacgttctgttggatcatgatcttccgaatctttttatctgcaaatccgagcactttcatagtcgcaaattcccggtaacgctccatatatgacaaaatgccaagattgtaaagcataacgcttccaagaattacggctcccagcacaagcagcattatcatcataaccattccatccatcatggaatccacaccctcgaccagctctctctgatgagatatactgcattgctcctcatatgttccaaatccatttgcaggttcttttccaataacagcagtcggcttatatacctgtcccgcggcctcataatctgatttttgcatgatgattccctggctgagcggtgtccggacaatggcctttacctcagagcgtatatacgatgtgcctcccgccggtttccatgtgatgaagccgcctttcctgattccgaggctgtctgccgttttttttgacagcgccgcgcctccgtacacggcagtaaatgtatccagattctccgccagctttaaatatcttgtactctcagatactgtaagcgcaacttctttctccccttttttccctctttccctgtctgtaccttccccggatgtgccgccggtaagaatggacgcgctgctctccatcaaatattccccgtctgtcattgcaagcagttctttctgtcctttttcttccggcagatctgttatcttgcattcataatcctgctgtttggtaaatgtccagtcagacagattcacaaacgtatcgtagagcgcaaaagcacagaacagaagtgccgtacagccaaggacaccgcacaggctcataaagcttctcagtctgtttctggcaatatccctgaggttccatctgcccgcaaatccgagcagttccattgtcccggggaactgctttccgcctgcaaaaggcatatctgtatatagaatgtccgcggcatttggcttcaaatacctcctgcatataaagaaactgataagcacacagaatactgtacagcccagcggaagcaggtaataaacaggcggaagatatcctccccataccgggatcacatacatttgccgcataaacttgtagataagtcccggaaggaaccggtagccacatataaacccgcccagcgctccggtaaggcagataaatgcattgtgagacagataatggaggagcagtttctttttagtgaagcctaatgccttcaatatccctatctgcatcttctcgtttttcagcatccggtgcatggtcgtcatgacgatcatcactgcgatcagaagaaaggccgccgaaaaggccgttcctatcgtctgatgctgttttatctcatctttcaccatggatatcgcaggatgttctgcccttacaattgtcttgacttccttttccccgagtatatcctgtatgatctgttttctctgaacacctgcagttattaccgccgcctcattataatgaagctggactcctgcgggcagcagcttcggacttatccaggcaaaccccgtgttcttatgctccggcatcatttcgccttcggatgccccgtatatatattccggactatagacgagaccaaggatctcccctttgatttccatgtctttgtagtccagctcgatctgcccgcccaccttatagctattttcccgggcgtacagggcgtccagccagattccttttttactgctgtcgtaagcaatccctttctttacatagagctttgaaatatggctgctctgcgccatataacattgtaacgtggattctttatttcctgccggaaccatcggaagtaccatcctgccttctgcttcgttaatccggacatcatttctgattttatcaatgtctctgccggtcagatcaccatacgtccacatatctgccatattctgctcatctatataagtttgaaaatgttcttccaggcctctccattcaccggtaattccggaaaaaaggaaacagccgacaaacatcatgagaaaaatggccataaactgaaccttatttctgcgtatatccctcagcatcttttttgtcaacattaccattccacctcttctatactgacaggatgttcatttacccggttctcgactatctgcccgtttttcaccctcactaaccggtctgcagctttggcaagattcgcgttatgggtgacgataagtgttgtgcgtccttcttccctgcacagccgtctaagttctgacagcaccatgcagccggtctcactgtccaaagcccctgtcggttcatcgcaaagcagcagatcgggattctttgcaagcgccctggcaatggacaccctctgctgttctccacctgagagctgctccggaaacttccgcccatgtcctctgagccctactttttccagcgcctcatccgcaggtacagcatcctttttcagttctttcataagcgccacattttcccggacggtcaaggtcggaatcaggttgtagaactggaacacaaatcctattttttctgctctatatgtggacaactctttttcgttcatctcagaaatatctctgcctgcgatctttacttctccttcatctgcccggtctattccgccgagaatattaagaagtgtactttttcctgcgccgcttggaccaagtatgacagtaaactctccctcttctaccgtaaaggacactttattaagagcatatagcttctgtcccccgctctcatatattctgcttactttttctaatgccacgatactcatttttctgcctccttctgctgtgtataataccggatcaccaaacgggatctcatatcttttcccatctcgtggctcttatattatctgctttcagaagccttttcaatagcgcctgccgtataaaaatcagaacttaacattcgttcactttaaagatgaatgctaagttatacctttgttcttcccgaatattttaacataaaaaagactgccttctcgcatgaaggcagtccggactgcttacaatatatcgctctctctggcttctcttttcacctttggcacaaactttttgtcaaacgcatccacctcgtcttccttaaccatgaaacttttatcaaagtcataggtgcctgcacatgctttcagatatccttcctccaactcatttaccataaaaaattcattctctttatcccggtctgccccgggcagataaatatcatatttactggcggggacaaaaccaaatctgcagtaatattgcgggctgcctgttatcatcaccgccttgatccctgtttcctttgctttctgtaatgtatgggtgattattttcccgccgatccccttcccctgatgatcggggtgcacactgaccggaccaaaggcagcaatactgctgcacatcctgccgtccttatacattctgctgtacacaatatttgcaacgattttaccgtcttctgccgccacaaaatccagttctcttataaaagcttcactttctctcagcttatgaagtacaagatgctcacagcatcccggctgataaacgttccagaatgcctcccttgtcagttgttccacatcattatgatcgatctgttcttccagacgaaatatcatggacatttacccccatctatttttatattattaattttacacgaaactgcacacggccgcaatcaaagtttctcttcattgactgccagtcccgtacatagcattttaaaaactttgataaattccttctgtgcatcttcggagtctttgtgctcaagcaatacgtgacggatacataagataaatgtagacgttagtatgtcgatatagggagaatcgctgtcttttaatccgagatgccatgccatatggctcttaaacttttttacaaactcctcccgtttctcaacaaactgtgtcgttcttaagtcaaataaaatcagcagtctttcatccagcagacactgaaattcttcataagccattaaatcattcatatttttcagcgcatccagcagttcctccattgaatatactttatcctgctgctcaagatgtccttccgtaactttcgcaagcttttccaaaggttcttttagtatctccgaaaggatggactccttactcggataataatgatatatatttccgagtgttgtattggcttttctggcgatcacacgcatagaagcagcttcatacccatgaagcagaaattctttctgtgccgctttgagtatctcttctccgatgctttctttcttcgtctgcattttactacctccgtatagacacatcttaaatgctttccacatctttttcaataatacaggatgtataaaaatcaatacttaaccactgttcattttagaagaaatttaattcattacttttcttttttaaccgctggtggtatactgtcggtatggggtattagcgcagttgggagcgcgcaacattcgcattgttgaggccacgggttcgaatcccgtatactccatgtcgtgaaaaaacgttaagaatccgcaatccctttagtatcaaggggttgcggattttacgtatatagaatatattttctgttgatattaaaatatgttctatatacgttaatgtctgagaaatggcaaaaaggtgagaaaccaacattcaaacagttgtgtataccgcagttttaggcctattaccgcaatagagaattgtattttatcaaacagagcggtataatggtcgaaaatatgaaatgatgggaccggtttaccgacgttccagctggaagtcaggacaacaccatgaaacaaaaaccttatggccaatatgggcaaaggagggcatatttcaatggcaaagcttgtcaagacttgccaagttcaaaaatgcgaggtgttatgaatgaaaatgcgtgaggaatttacctgccctctggaactggttcacgatatgattaagggcaagtggaaaccaatcattttgtggagattgcgattaggcgcaacctctctttcaaaactggaaaaagacattgatggcattacacagaaaatgctcttggaacagctcaaagagctgatagattatggttttgtcggaaagaaatcgtttaagggttatcctctccatgtggaatattctctaacggaaggacaaggccgtgagctgctaaaggccttaacgatcatgcagcatatcggtattgaatacctaaaaaaacaaggtaaagaaaatgtgctgatcgaaaaaggcgttgttcccgaataagatacttacaaaaaagtgggtaatttactatttgcctccatgtggttattatgtaattgaacagaaaccatgtggaggtattgttatgaatgtaacaagtacaggaattattgataatactattcaagacaaatttggcgggcgaggaacacaatttaatgaaaatggtatcccgacctgttctctgccaattaaaattgaaaatgccccaaaagagacggtatcattcgcccttgtattggaagataaagacgcctatcctgttacaggaggatttgtctgggtacactggctggctgcaaatatcacacgaagagaactaaaagagaacgagagccagaaagctcaagactttgtgcaggggaacaacagttggacgagtattcaagggaatcagcaaagcaaagcgttatcttgtttctacggaggaatgacacccccagaccgagcgcatatctatgaactacacgttttcgcattagataaattgttggagcttaataacggatttttcctaaatgagttgtattcaaaaatggaaggacatattttagcccaattcacattaaaaggcagctatgataaagtataacacatcttgttttgctttttcgatttcccgacgataaaagccgatcttatcgtccagtttcacaaggaggtttttcaatggtacagaaatcagaaaaatacacagtcattacaggggctagttctggtattggttatgagacagcaaaagcatttgccgcccgcagtaaaaacttgatcattgtcgcccgccgtcagaataatcttgaagccttaaagaatgaaatcttgcagaaatatccggcactggatattgtaatcaaagtcacggatctgtctattctggaaaatgtatatcgtctctatacagacttgaaagattattcgctggaaacatggattaacaatgcaggctttggaaactacgacagcgtggcacagcaagatctaaaaaagattgaaaccatgcttcatctgaatgttgaagccctcacaattctatcatcacttttcgttcgggactacagagacattgcgggaacacaactcattaacctctcttctgccggagggtatacgattgtacctaccgctgtcacttattgtgctgcaaaattttatgtaagtacgtttacagagggattagcacacgaactaagagaaagcggcgctaaaatgcaggtaaaagtgctggcccccgccgcgacaaaaacagagtttggaaaagtagcaaacgatgtcagcaattatgactatgataaattgtttggaacatatcacaccagccagcaaatggcagcgtttttgttggaattatatgatagcaataaaatagttggtacagtagatagagagaattttagctttaaattatgtgacccgctattttcctactccggtaactctaaacacaatcaaaagacaagtaaatagtatgcggtaattctgccgcacgacggcaaaaggaaaaagccgtctcagattatttattcctctgtttttccagcctgctttatgagctgatttatatatgtgctcactcccgccgccaggatcccctgaacgaccgctgtaaagagcgcgatggcaatatcccgggccgtggcacagctggccgttgccattatccaaataccacacatgaagatgccgataatgccaaggaccagcggtatgtacttgtccttcagaaacgcagcctgtttgaaccacatacccaaaaaatataatgcgatcgcaacagtcatcagttccggttttatataattcataatttgttccataatttttttcctccttctacttgccgctaataaggtccggcagatcatatgaatctgtttttgacagtgctatcttatcagcagctgcagggacaaagagggacatgaacaaatattgcttatctgcatatgtaaaaatctttctgaatcagaaatagttcttttgtttatatgtcgttacatttcggtttatttcttttttcatctattttcctttatttttatctattataatctttttttatctatatttctccaaaccgtatcataatgtatacaatatgcctgtaaggtcataaggaggcattatgaacaaaccaagagctttgctgttaaggctcgggatacggtctacactgaagggatttcacttccttctgtacgctctgcagctgtgcttgtcaaacgatgagtacctcctttctatctacagaactctttacatggataccgcagtgcacttcaagacatcgagagataacgtagaccattgtatccgcactgccatttctaactgctggtataaaggcaaccgggaacttcttataagcatcgccggctacgaacttaaacagaaaccagccaatggagaattcatagacattctctataattacttatatgaggaagcataggcccattttacgggcctctttcttttcaacaccttatcattatttgtctgaatttgtcgaatattgtcgtttatgcctttttatcatctgtttatgtccctgttcttctatatatgagcgcagcgtatacaattactctgtaaggtcgtgaggaggcattatgaataaaccaagagctttattactaaggctcggcatacggtctacgctgaaaggatttcacttccttctgtatgcgctgcagctgtgcttgtcaaacgaagaatacctgctttctgtctacaaaactctgtatatggatatcgcggcacatttcggtacttccagagataatgtagaccattgtatccgcactgctattgcaaactgctggtataaaggcaaccgtgatcttcttataagcatcactggttatgaacttaaacagaaaccagccaacggagaatttattgatattctctacaattacttatgccaggaaggataggcccgctctgcgggctcctttcttttgtgacctgatccattttctcctgatcgaggtaaaccagcggtagagtccctgttcaaccaggaatcggttgattcgccctcataatactcttatactgttgccaacggctggcaaatacagtagaattgaaacgaagagaggtaagaatatggaaatcaatcaaagtgaaaaaacggggaaattcatttgtgtcatgcgaaaagaaaagaatctgacccaaaaagatctggcacaaaaacttgatgtgaccgataaagcaatatcaaaatgggaacgtggaataagctgtcccgacatatctctattgatccctctggctaaagtattggatgtgactaccagcgaacttctgaacggagaacgcgcgtcagaagagcagcctgaacatgcggaagctatggtggaagaagcgctgcactattctgacagaagttcaaagcttaagctgaaaagaaacagacatattatgttgatcgtgctgactgcatcctttcttattgcgatagtcacatgtctgatctgcgacttccgcctgaacagctcactgtcctggtctttgatcgtcattgtctccctccttttttgctgggtatttcttctgccttcttttaaggcaaaaaataaaatcatcaaaaaaacacttgccgtggcgagtgttctcgtgataccttatctggcagccttgagcctgatattgaaacagccgcttgtttttactcttggcgcctccatatcagtcatcactgctatcgtactctggtgtatatacattgtttttttcattcttcccggcagaaaactgtgcgcaacaggaatatcgtttctgctggccatacctgcaagcatcggaataaaccgcgtgatctttttatttacccggcagccggggcatacattttcagaatatttgatgaacacgctcggcctgtctgtattagcggccgtctgctttggcgcacattatctaaattcacgcagaacagaataggataggacagagcctgctgcggctgactaatccggctgccgtctttcggacagatagttctcaacttcgtcagaagtcagccggcggacctctgtatccggatattctacaaatctgcctgcagtaaacaatggttctgcctgtgtagcctttttatctttgttctttctgagataatcctgaaaatcttcagaacacgcaaagattttataggagacccgtcctttgctgtttttcatctcatatataccgcacggccgctttactgtatagtcagcggttcttaaatacaatctcgctatctccagcgacttgaagggaaaattccatctctgcagtccccgcttctcgtcacgttgtatacagatacagcggccgcatgttccgcagatatactgtgtatggttttccagacactcccgcgctcccaaaagcggcgtaattctgctctcatttacataacattcccggcacatatcttttttacctcccgcatatcttatacctttcttttccagctttataattttgatctccagatctgccatgccgcatattgtaccaatacactttttaagacagataacaaaagggtcatatcgttttattgagtgcatcctgaagtaaatctgccagctttccgacatgtatgccgtctacaaaggagtgatgggcctgtaccgaaaacggcagcagaatcctgccatccctttcaaaaaatttcccccagtcaaacagcggggtggcattttctttattgcccgaatttgtatgggatatatgcgtgtatgacacccacggaaatggagaaaactggaacacatcgtttccaagaggccctgtaaaatactctttttgctcccgcgccgctttcagtgctgttctcacataatcctccgccgtttctttcatgggaacatttacaactttaaacagttctgtctctttatctatgtatgtaaaagccgtatctatatggtcaaacaggaccacctgcccgtccacaaaccggtagcggaattcttcgatattgttggcgcattttgtgaccgtatatatgagcgacatcgtgaaagaatagcctttcacctttacttccttcagaaagttcgtgatatccagctcaaaagtcacacagaatgcaggctccacactgtttctgaacacctgacaatgcatgcttctcttccagtttttttcgtcaatgaccttatatgaattcgccatagctgattctcctttcaatttcaatccagcggctgacagcggggacaataatagaccgagccgccgagatacgctgtcttgactatctctcctttgcatataggacaaggatttctgtatgtgtttttagacataaccgtaggatacttcccgggacttccccaaatatccttttccgtatccctgccgccaaggcgggacatttctgccagcactcccttgacactcccaaataagcgttctgtctcttccgccgtcagtttcccgaccttttttttcgggtggatcccggctcgaaagagaatgtcctgcagtaccccgtttccgagccccggaatcctctgttctgctgccagaaacgctttcgcacttatgccaggcttcacacctgccaaaagtccccggaaatattcctcgtcaaattcgtccgcaagcggagacagtctctccttgctcagcacataatattcattggcacacgtatgctcatagcagagaatccctccatacattgccaccgtaaatatcagcacccagctgtctgtaaaatcgatccgcagctgatatttttccggcagcccggcagacggttcaagcagcctcacattgacgccgtcattaaaacagagtccaaagccaccactgaaccgaagctccacaaagatgccaaacccttccgccttctgcacttctcttccccgcagctgtctgtcataagcttccggctccccattaaaccagcagaatttatgcggtgaagaaggcggatacaccttcgccaccgtctttcccgcgatcgttttatcaagctctgccgcccttgcaagcgcctccggcaattcgatcatattctcttacctccctggtttttatcattctgccgccatcatacaccggaaaatatgacaacctctgtcatatatcgtacaacatccggattttttctgcttcttccagcagctcccggcacacccactcaggctcgatcaccctcgcaagggcgccaaacgaaagcagaaaccgcttgatccatatgcccggcggaaatgcggtatttacaagaagagtcccgtcctcttccacctcgatgtcatccggagcgaaaaagtccatcacctgaaaagacgcctcgccggagaaccggatcttcatggggatcatctcctgaaccggctcagggcgctccccttctttgtacacctttggtgtaaatgtctcatcttctatacaaagcttcaatatcctgctcagacggaacagacgaaacccgcgccgtctgcggcaatacccggacacataccagtttccgcccttaaaacacagcttcagcggctccaccgtccgctcacaccagccgccggaagagttaaagtattcaaaggataaaagcctgcagtgaaggatcgcctccctgcatatctcaaaatattctttctccttcttcatagctccccagctgccgaaatcaacttccagccatccaacggcctttttaccgaacaggccggacatctgtgtgagaagactgctgccctcgatcgcgcctaccgagtcgagactctgcagcgccgtcaggatctgctcctgctgttccccgctcagcagggaacggtccatcttaaactcttccatcagacggatcccgcctccctgtcccttctgggcatataccgggatccccgccgccgacagcgcgtccagatccctgtatattgtcctgacagagacctccagccgctctgcaagcatgcctgcggtcacgtcgcggcgctccatcagcagatataaaatttgaaaaagcctgctgcttttcatatccgtacgctccttatctatctcgtacactgccgccaagagtagtgtcctttgttttttcgttttacttcgtacaattccttatctgcctgctgaagcagcctgatcatgctcatttctctgtcattcgtacatacataaccaccggaggcacttatcatgcatttctctcctgttccaaggctgaccgccctggtatgcagctccttccagaacccatccagcagagtccttatctcgtcttccgtctcgaatccgaagacaaagatacagaattcatctccggaacgccttgacacaagacaatggtctttcggcagctctttcatgacctgcgcaaactcctgaagatacctgtcccccacatcatgcccgtacgtatcattgatacttttgaatgcgtccagatctatcatgacacaggcgcatatttcatcctcttttaaactgcacagtacctgtgaagccgtctctttaaagtacggatatctcgcaagcccggtcagctggtcgtggttattttcatacagcatctgccgcttatccatcatttctttcgtggcatctgtaaccgttccataataccccgtctcctctatggtaaaatggatccgcacatatttctgtgcgccgacgcaatacacatcctcttcattttcaaccggaccctccatgaacacgcggatcatctgcaaaaatgccgccggttctttcgtataccgctccagcatttccttatccatatcgagcagttctcctagtttggacgtaacaaagacatagtccatatcattctgatactcaaacgccgcaagagggatctgtgacatggcaatgattttcgagatccggtccgagctgttcacgacgctttttaccatagagttaatgccatggcttaagtcgaagaactccggagcgcctcccacttccactgtcgtatccagctctccttttgttattctggacaggccgtcccggagcttgtgtatgccgcttacgaccttttgtttcacgagatagttcagcaaaagtaccgcaacgatctccaccgccagcagatagagaaatgtaagcagtatatttttccagaaagtgtggtacagcgcggcattcgatataaatgcgcctatgagcacgccttcatgggatctcgtgacgacatagttctgcgtcccgcctgccaggatttggaacgcccctgtctcacactttttcagactctcgagaccacgatcttccagtccggctatctcttcgcttcgtccagtgtacgcgacaatctccccgctgtccacgtccatcgcaaagaagccttcccccacatctgtcgggaatctggagaatatataatcatacgtgtttctctcctgtgcctccatctggcgcaccggctcaagtcccacctgcacaagtcctttcacgcccttccttgagacgcccacatacttcatcatcttcttttccgctgtgttaggctgtgcctcctgtataatatactcatcgccgcctgcgctttccagtatgggaagaaagcctctcatctgcttcccgttatgaaaatccaggccgatatattttggaacggaggaataacggatgatcccgtctgattctgtcacatgcagctcatccacattcaaaagggaagccagattctcaagctcctccacactgtcaagcactccgggattcttctccaccacataagccgcagcccttgcacgggtcaggtaatcctcgtccaggttctttttaatggaagccagctctgtctggttattttccattgtctggataacctggtctatctttgcgtgaaatgtttcaagctgccttccccgcagcgcattttccgaaaggaaaaaattgatcacaagtatagaaagaacggcaatagacattattataatcgtatacttcttaaatatcttctgcataggttccctttcatgaagaacaaaagctatttaactacaattataacatcatattgccgttcatagtaaaaaattaaaatgaaatctgtctcttcaattttatatttttaatgtcttaagcctccggcacgcctcttccaccgtgtcgcggtcaaaagcatagcacgcgcggaaccagcccggtctggtacaaccaaacagctgccccggagacacattgatcatcagctcattgtatatcttttcccacaatgtatgttccgcctcaaattcctgcttttccatgtaagcagaaaagtctgccataacaaatatgccggcctgcgccttcatcgtccgtacgcctatcgcttcaaacccgttggtgatcatatcatatgcctgcgcaagccgcttccttgaaagctccatgatgccgggaagctcaggggatctcagcagggccgtgagcagcgactgggtgtgggaggagacgcaggagtaatatatgatcgatgcaaatccctgtataatacaagggttaaacgatatacacaagcccgttctgaacccggacaggacaaagtcctttgcaaaactgctcgtgacgtgcactctgtgacggtatgcatccggaaccagcttcagcgtgctgacaaattcagcctcaggatcaaagacggtctgcgcgtatatctcatccgatatcacatccaggtcatgctccatggcaaagtcaagcaggccccgcaccgccgcctcgccgtataccgtcccgacagggttattcggcgaagaaaagagcacggctctcactcttttcccttccttcaccactcctgcataagcctcttcaaacgcttctctgtccagactttcatcgcagggcacaccgacagggatcacccccgcgcgttcatgaatgtcatctacaaagctggaataatatggcgacggaatgaggaacacatctcccggctccgccagaagtgtagccagcgtctcaagcgcaactgtacagcccgcacaaaccgccacattctctttcctcagcttcacttcgcttccggctccgaaaataagcttctgccagtggtccgcgatggccgagcggaactcatcactgccctcgaacttattataatggatgttgtaccctgtcagatccatgcgctctgccgcttttcgcagaaggtcgcagacttccccgttgacgagatggctttccgcggtacccatattgatcaggcctttcggatttgtctctttgtcatacatattataaaaattatcaaaatgggccttcacgagcggcggcaaggtccgaacccactttttcccgcgttctgataaaaattcgagcattctgcccacctccctttaattgtgttccagtcctgcctctgtctgtatgccggggcgcacgccgagtcccatggtagcgtcaatattagctccatgcatgagagtagattcatcccgcagcagttctcccagccagaacgcgatctcggacggctggatcagtcttttcttcgcctgtgcggcatcaaacgccgcccgttcctccggcgtcatatcctttaatgtgctggaatagaacatcggtgtctcgatcgcacccgggctgatgcagaatacgtcgatcggcgtgtgtgtattttctgccgccagctgtctggcaagatatgccaccgcacatttactcatgccgtcgcttaaagtgaacttcgggaaacaggcgatcccgcctccgaccgaggaaatgaagatcagttttgtcttttccgtctttgcctcgatcaccggctggatctttttgtatatccaaagaggaccaagggcatttaccgtcatcatcgccacatcatttgccgctttcagcgggtctccctgttctgcataatctttgacagtccctgagccgagggcagcgttaaaaatcacgccgtaccattcatgctctgtcagaaaatcagctttctcgatctcttcgagttttccctggtccagcttatacgcaaacaggcgccccggattttcccgcataagttcctctgccttacccgcagagcgccggtatgtaatatgtacctcatatccctgtccgagcagtaattttacagtttcaagaccaactccctgtgtgcctccggttaccaatacttttttcataatgatcctcctttatattttcttgattagaacatctgcttcatcaaaatcttcatattttttctttctgatatactttgtgtagatcataccggcaaaaattacgatgcccgcgtatccggaaatcggataaatgatgctgatcatcgtcgagaacgaaagctgtccgccgaaaatgctcacgatagctgtgacaacggctgcgatacggtatgccctgctctttccgtcagaggatattttattgcagaccgtataaagcataggcaccgccgttgtatagataccaaggagcagcagcacggaaaaaacatgaccaaataccggacttatagatgccgccacaaaaagagacgggatctccaggttgtagacatccgtgatattggccagaagcccgaagttcaggatcattacggcgatcaggaaagcgcctcctccaaacagacctcccagtatagagttcttcctgttcgtcgccgtagatttcccgatatccgccaggtatggcacgacccccgtgactgtatacgcgccgtacataagtcctgataacgcccagttattaaaattcgtattcacctggactgtcttcaggttctgatctgccagcgcgatgccttccggattgttcacaatggataagatgccgatgaacatcgtaacaacgagcagaaccggtgcgatgtagcccacgatcttgaccagtttctcaagcccgagcaggacagttccaagcgaagcgatgatcatgaccgcacgtccgatattcccgttcactccataatactcctcaaacgtcgaacctgcgcctgagatcatcatggaatatacgaaaaacaacatgatcggcgtaaaccattccatcacaaacccgagatatttgccgaggtagaaattaaacatcttgccggagttattcagcttcagatatcttccgtcttccacgatcgtgcttacgaaccatgcgtaaagtatgagcgctatcgccccggccccgatacttcctgccacgccaaagccgctgaaatactgcatgcattcctgtcccgacgcgaagctggagccgatgacaaatcccatgaacgccccgcctatggcgatcacctgtccaattttcgccctgttttcttccatatctgttcccccttttctaaaaaatatagtgttaagtgttgcccgcagaccgtcattttgtctgcggccggatcctctgcagcattgctgctatggctttattataaaattctttctgccggtttacacttgaaccaatgtgaatgaattgacaaacagaaaaacggacctgaattcaagaaattcaagtccgccggaaaactggttttacagataacggagcacatcttctgctgtcagccggttgcagaaaggcatgccgagcatattttcaaagaattgctggaaggcgccccgcatacgcgggtccaaagagatgtgataattatcgttcggctgttttttagaattttcaatattcagggaatacgtatcgagaaaaatggaaggcgctcttctgagttcctcgctgagcacaacagtatcacggatcacataaagcctgatctgcggattctccgacatgactctgctcaaatatgtcagatggctgcgcgtctgctccgcggtcagatgatggctgacgttaccgacactgatatttccgtttgtgagatactcattcagcttggaggaatacagcaccagatcgatccgcgccttgcacgtatgcctggcgaatacatttttcagtttcacaagataacgcgcgtaactgtcatcctctgcatttgcaataaatacgtccatgatctccttcgggaagagcatggcgggcggttcgttaaaaaactgccactgacggcggtccgaataagagtcaagctgcacattggtccgtctcagactctccggctccgccggatccagcagcttttcccccgcttccatcacctgctggcagataccggaaaactgccttattatcttatgttccatagaaaagacagcccctgtctcaccgcccatgttccagagaacctgcaggcagagcagatcatttatgacgagtatgcgcggctgctccggtttcctgctgacaatatacatctctatataatcaaagcttccgatcgtatttataatactggctgcgtaataattatgatctgctgccagctcctccggatccagcgccagtctcagctccaccttcttcactcctgcgccgtgcagctccgtcatcagcttcctgaattctttcccgtacaggcggaaaaggtcaaaagtagccgtaatgctgatacatccgccgtacatgttcaaggcctgtacaaaagcggctctcgtcagctgtatcagcatctgcaggttgtccgcgaaggacatctcgttattgttataatcctggaatatgtggtaattccggtcgccggcgtaggacattttcaagtccgccagacatttctgcctcccggcttccctctccgcctcatccgccgcatcgatacgcgccgtaaagaaatccgccatctgcccgatgatccgttctgcattccgctccgacggcagtttacttccattcatccatttgctgatatatgtggcatcatagctgagcgcatccgccagctcgctttcttttaccccggctttctccatctgagaacgaagtgattttccaaactggttattcatgtcacacctcttttctctaatcattgtatatgattcattcccgggtgacaagcggatcgcgtgaaaatattgcccttaaccgctcactaacacagtttgttgccgtttgccacaagcttaaactgacagtcgaacacttctgccgccctgcggcacattatcatgcggttcataaatatttcaaaataatccatcacggaacacatagaatcatccagctccagcgtcatacggatatttttcttctccttatccacatccagcacagaagacagcgcggcataattcaccctgtcatggatatcaaaattggcgatcaccagattctgcacacggtttcggcggacatccgtcttgtcggcaaggataagcgccgcggacacgacatccaccgctgttcccgtcgcctcatcatggttgccgatcgccgtcgtcaccgtgagcacatctttgaacggcattcccagatcttttaatatcccgtacgcgagcactgcgcctgtatgggcgtggtcatggcggtttacgctgtttccgatgtcatgcatataccctgcaattttagccagctctatctcatgcttcccgtagccgagttctttcagtatcctgcccgcccggtcagccacttttgccgcatgtcttctggaatgctccgtgaatccaagcaccttcagcacagaatttccattttcgatcagcagttgtaattcttcattttctcttatctctttgtatgatattaccttttgcttttctttcatgatatccttcatcctctattatgttctttctcatagaatgccctcttttatccggattatttattacgagggcagtgccggtctgccagggcacatacgatgagtgtaacgcataaatgaaagaactgaaatcctgtaacggaaaagcttttgtaaaattcacgtaaagcgctgcttttttacgattgccttaaaaacggtgaccccgccagcgctttattgataaactcattgaacggttttatgatcctgcacacttccactgtctcactgataaatctgtctgcgtcggccagcgcttcatctgccatcgggtattctacgtaccagctcttgtttttcagatatcgtgcctgcgggtgttccctgtcgtatccggcaggcacatttttcagggcagtaccctttacttcaaagagactgctgaagctttcgtcacggataacctcctcccactcttcgccgtgtgcggctatataatcccgcatcatccctgtctcttctttaaaaatatccgcaaacagacctcccccgaggaatgagccccccggcgtgagcatcaggtaatatccggccgggaccggctgcttgccgccctcggacaaatgcgccctgaacgcggggttatacggagacttgtccttactgaaacgggtatccctgacaagcttgtacgtaagcttctttggttcatgcctcaagatacccggctcctctttcccaatctccatcataagagcctccacaagcttcaggaattctcctgccgccgcctcgtattccggcttatgctcatggtaccactccctgttgttgtttcctttcaggcggtttaaatactccaagatcatctgcaggttcatacgcttccctccttatgcctctgtgatcgtacggtattcatctgaatcaaaaaatctctgcagccattcttttacctctctgcctccgtgatagaaaggcatgccggaaaagacaaaggacagatcatctacacgctccatcgcatttttaaatccgttcaggatctcatccttccccttctccagagcggaatactccagatcatccggccgaagtctgtgacttgcgatggcgtaattgatccgcttcctgcatctgcacataccgccctccagtccgcagtattctctcataaacccggccatctttgcgcgcacacgggagagacgcttccggtaggcctcaggtgagattccgagaatatcccccgcgatcgtgctgtccactttgaacatcgtaccgagtataaagatgcagcggctctctttgtccagacactggagcatcacattggtgcaggacattttaagctcttcttctaaaatggcctgttctactccctgggtcaggtcaggtatgtccttttcctttcctccggcgatgtcctctccgtagaactcaaagctgagcggatattttgaaaacatgttcttcttataatcgctcagataattggccgcgatccggaatacccacgtcgtgaaccggctttctctgcggaaagaagaaaggttcgtcatcactttgatcagtatttcctgggaagcgtcctccgcgtccgctatcgttccaagcatccgcagagaaaagttaaatacaaggtcctggatctctgtgagtatcttttctaccgcacttttgtcccctgccacggcccggccgacaagacaggccatctcgttttgtaatgtatcatccatataattatacctcctgatatattagactccgttttggccgcgctgtgacataaaatattatttaatttctcagccggaacgttctgggcgcgaaacggtatacgagcagcgacgcaatgatgctgtaaaggatgcagaataccgttgtcacaataccgaacacaaatgtatccatacgaagcttcataaataaaaagcagacgatgtatgtgcccgacatgacgatcctgtatgtagcgcttttcagttctgtgttcacattgtacggctgaagcagataataacacgtcagatagtgcaccgagaaaaatacgctcagcgccagtattgagacgaacaaaacaacataattcagcgcattatctgtcccgccggaaacatagagcatcaaagcaaagcctgtcccgatcactgccgccggaagcaggttgaccttaatgatctcccggagtctgatacagaacagcctgaggataaattccggcttcttataaaaggcaaacgtgagcatactgtggtcacagttcataaacaacacctgggtaaaggaagtcccccggttgatcgcatacatgatgaaaacaaagtatggaagaaagacgagaagaagcctgttgaccgcaagtttgacctccatatttacctgcatcacaacaagaagcgccgcaatgataaacgccgcaatacaggctgtccttccggcggggcgccacagcgcccttttatgcctgcgtataaacagttcattaaagtattcaaaccctttcttccggctcgtaatggccgtatcctggctgatcatcttccggctctgctcttccgtcgtcttatgtatgatctcgcccacctctaccgcatttcttttatctgccaggataagctggtacatctcacgatagcggccaaatttcatgatctttgtcaggcagtacagaccggccgccaaagacagcgccgcagccgctgatatcacagcttccggcaccgtgatgcctatatagggaagcccgtatgccagcacaaggagaataccggtcagcggccatgcaaatttgggcggcagattctcgttcatgcatatgccctttctttcgtagcggctcaggagcagccatgccgcagtcatcttcgcccccatgataaaaaacggcagtaaaatataaagcgccggagccgtcccccatttcataccgaaatatatcgtaaacggcagaaatcccactactgtctttacggatgtatacagataattggacagtgtgtacgctctggcatccatacgcataagtatcatggcgtagtatttatcgttagacgggtcaaacatatatgtattcatgaacgtaccgataagcgtcaaaaacagcagaatatgcatgctgacgctccctgcgtccccacctttgtataagcctgccggaagcgcaacaagcagcaggaggtacaaatactttccgaggaacgcagagacgatctcccaggcagcagagagaataccggcaaaaatcttaagccctctgcttgcgtaaagctcgtctgtaaacagtctttttatgacagggatctgctgaatagaataaatgatcccgtttacccggtacgtattcttcagatcgcaggaaattcggaatgctttaatcatcttcttcctccttgagcgcccggatgatcttatccttaaagccgctgttgtccagatcatacttatccacgacctccagctcgccgtgattcaatatgacgatctcatcgcacagatccagcgcaagctccatgatatgagtggaaaaaattatgatacggtccttcttcaatgaacgaaggagctctttcatctcctccgccaccacaacatccagcgaggtcagcggttcatccagaagcagaagcggcggccttgcaataatattcaccagcatctgcatcttatttttcatgccgtgagaataatctttgagcagacggtctctgtccccgggttctatgttcatcatgtcaaaatattcatcgatgggccgtaagtcgggaatggaactctcattgatctctatgaaaaacttgataaactcgcggcccgtgagaaatgccgggaccgtgggcgcagacagcacatagccgatatcttccggcctgatctgcgctttgtttccgtcgttcagataaaaacttccgtcctccgcctttatatccttgttgacacagttgaacagcgtcgtctttccggccccgttcctcccgagcagcccgtatatcttgccgctttcaaatgtaaatgatatatcctttaaaacttccttggtcccaaagctttttgtcaaatgttcgataataaattccattctgttctccttatgattcgcgcagactgtgcctgctttatacaatatttctaaaatcatcactgtcactaaacttcagcgccaaacggcataagcgccagcttagccagtttaaagtgctgcatgccgaacgggatcccgataacagtgacacagagcagcagtccaaacaaagcgtgctccagtgcaagcggaactccggatatgatcagccagatgatattcagcagaagagagcctgcacctccgccgtacctgacttcctttccgaatggaaagaagctcagcgacgcaaatttaaagcactgcattcccaccggtatgccgacaatagtgacacaccagagaagacctgccagacaccagctcagtccgctgactgctcctccaaacacaaaccagagcacatttccaagacaacccatacgtttcacctcctttataaagacagcattatataaacgaaaaaagacctctatcatgacagaagcatctgccacaataaaagtcccgccattgggcatacattccggagtctacgcttcccctctccatctgcggcagctctcaagcctgggagccgggtcaaatcccgcatccttccccatatttgcctccatctcacatggaaattgttcacattccccacaatgatttattcctcttccttcgcagcagctcttaactttgcagtcgccgccccagaaaggcttttccatattcgtacatccggaacagtttacctcttccttacgttcacagtcactgcagcatatgccgcatctcgattcatacatctttctttcctccttcgtacgatccgccgttcagtccaacgtattaaatacattatagggtgaaagcttatgaaaaacaatgacatttttccaaatagctccatcctgaaattgctttttcctccgccaccgcttatactattctctgtaaaggagagactagcgttatgagacgattattgaaatatctgaaagagcatcctctggcaacggttctggcgccgctttttaaaatgcttgaggccagctttgaactttttgttcctcttgtagttgccagaatgatcgatacgggtatcagacagcagatgaccggctatctctggcagatgggcggagtccttgtcctgctcggcgttgtcggattcggcttttctgtcaccgcccagtattttgcggccaagtctgcggtatctgccggtatggcgatgcgaaatgacctgttcgcacacattaatacactgtcgtacaaagagatagatgcggtcggcgcctctactttgatcaaccgcatgacaaatgatgtcaaccaggtgcagaatggaatcaatatgtttctgcgtctgtttctgcggtcaccattcgtcgtgttcggggccatgatcatggcatttaccgtggacgtgaaagcggcgctccctttcgcggtggcaataccgctgctgcttctcgtcgtctttgccatccttcttgtcagcatgccgctgtaccgtaaagtacagaaacaggtggacaaagtgcttcttagcacacgggaaaatcttctcgggatcagagtcgtgagagcttttaatcatcaggacagtgaaatgaaacatttccgcgaacagagcactgctctctttcacagacagattcatgtgggaaagatatccgcgctcttgaatccgctaacctacgtcattatcaatctgggcgtcatcgccattctctggaccggcggcagacaggtctccctcggcacactcactcagggacaggtgatcgccctgatcaactatatgtcacagatactggcagaacttatcaagcttgccaaccttatcattctgctgtccaaatctatggcaagcttaaaccgcgtaaatcaggtattcgaaatgcagccttccatcgacagcacagggctgccgctgtcacaaaaaaagaacgcattttcaggaaataccggggaattaaagtctgtaatacctgccgtacaatttgacaatgtatcgttctgctacacagattccggaaaagaaacgctgagcggagtgagcttttccgctatgccgggacagacgataggcgtcatcggaggcaccgggtccggcaagacgagtctcgtaagcctcatcccccgcttctatgacgtatcaaaaggagccgtactggtcaacggccaggatgtaaggacactgaacccagtctctctgcgaagccgcgtcggacttgttccccagagagcgcagctttttaagggaacactcagagaaaatatacggtggggaaaaccggatgccagcgatgaagacatctatcaggcgctcgacaccgcacaggcaagagaattcgtggatgcaagggaaaagggactggaactgatgatagagcaagaagggggcaatctttccggcggccagaaacagcggcttaccatcgcccgcgccctcgtgcgcagacctgaaatcctcattctggatgacagcgcctccgcccttgacttcgccaccgatgccagactccgccaggcgatccgggaaaccaccggacagatgactgtttttatcgtgtcccagcgtgtatccgccatccgtaacgcggatatgatcatcgttctcgacgacggtgagatggccggatatggcacgcacgaagaactgcttagatcgagcccggtatataaagagatctgtgaatcacagacatcaggacaggaggaaacacactatgcaaatgcataaaaacagaccgaaaaatgaaaagcacagccggaccgttatgaaacgcatcctgacctgtataaggccccacaccgcgctcgtcgtcttatcgctccttctctctgtcatcacagtcatactgacgctttatattcctattctgacgggccatggcgtagatcagatcatcggaaaagaaaatgtggattttaaggaactgtccgcggtcattatcacgatactggcatgtatcgcagtcacatctgtctgccagtggtttatgaaccatatcaacaataaaataacataccgggtagtaaaggatcttcgcatctgcgccttcaaccggctgcaggtattgccgctctcctatgtggacagtcattcttccggcgatctgatcagccgtgtcatcacggatatcgaccagttctccgacggcctgctgctcggctttactcagctgtttaccggtgtcatcactattgtgggcacgatactttttatgctgagcattaacccgtatatcacactcgtcgtggtcgttttaagccctctttcctttctgatcgcaaatttcatttccaaacggacattcgccatgttcaaaaagcagtcggaggcgagaggggaactgactggattcacgaacgagatgctgggcggcatcaaagtcgtgcaggcattcggccaccaggaagaagcacaggaacaattcgaggagatcaacagaagactgtctggttattccatgcgcgcaaccttcttttcctccatcacaaaccctgccacacggtttatgtattctgtcatatatgccggcgtcgcgatcgccgggtgctttgccgttgtacggggaatgctcaccgtcgggcagctctccagcttcctcagctacacgaatcagtacacaaagccgtttaacgacatcacaggcgtcataaccgagttccagaactcgctcgcttccgccgcccgggtatttgaactgatcgaccagccatccatagcagaagacaaggcaggcgcagtacggcttcagaaccctgaaggccacgtaacaatggaacatgtcagcttttcgtatgtgcctgaagcaccgcttatagagaatctgaatctggaggcaggctgcggacagcgcattgccattgtagggccgaccggctgtggcaagacaacgctcatcaatctgctcatgcgcttttacgatgtcaactccggaatcatcaagatagacgggcagaatataacagatataacgaggcattccctgcgggcggcctacggcatggtgctgcaggagacatggctgaaagcggcttccatccgcgacaatatcgcctacggaagaccaaacgcctcagaagacgatattatccgggcggcaaaagaggcgcatgcccacagctttatcatgcgtatgcccgacggttatgacaccgtcatcgccgaaggcggcagcaatctgtcacagggacagaagcagctcctgtgcatcgcccgcgtcatgctctgccttccgcccatgctcatactcgatgaagcgacctcctccatagacacgatgacagagatccgtatccagaaggcctttgaaaagatgatggaaggccgcacaagctttgtggtcgcgcaccgcctgtccaccataaaaagcgcggatatgatactcgtgatggataaaggccatatcatcgaacagggcgtccacgaggagctgctgaaaaaaggcgggttttacgcccgcctgtacaacagccagttctcagctgtatgactctgagttctcagatacctgttttattccggcctgtccttccgtctgcgcgataaatattcatataacatatgccggagtgtccggatatctatcggctttgaaaaatgtgcgttcatgccggcccgcagcgccatgcggacatcctcgtcaaacgcattggccgtcattgcaatgatcggcatgtcacagacgtctttgcgcacgagggcgcgtattgccctcgtcgcctcatagccgtccatctccggcatttgaatatccatcaatatgagatcataatacccctcttccgattccgccactttccgcaccgcttcttttccgtcgcatgcttcttcaatctgaacaccagtctcaccaataagttccctggcaatttctctgttgatcgcattgtcttccacaagaaggagacgtttgccagaatagtccggaagtatctcgctctgttcttctcttttctcctcaccactcagacgctccagcagaccggccatcttggatcgatagcacgggcggtacagaaagatggaaactcctgccgaaacagcgtccgcctccatctctttggaacgccggccgccgagcgcagctatcgggacatcttctgccagttccggccgcatcctccgcacgatgtcacatctgctctcggacggagcatcccatccgaaaaagataagccggacattttcagaacagagttctcttacacgttcaaacgtgtactctgcctcacagacatactgtacatccagtcccagttcactcaatatgtttgccgcatttctgcagctgtgtctatcatcatcaagaatgaggcagcgcgcatccttccattcttttggaccttctccctgcacttcctcctgcagcttaagcggaaccgtcacagtgaacacggaaccggctcccggctcactctccacctgaatatccccgttcatgagatcgattatatttttagtgatagccatgcccagtcctgttccgactaccttgctgtccgtagaatccttcgcccgttcaaagggaagaaacaatttttcaagaaactctttcttcatgccaataccggtatcggcacaccggaatataaagctctggtatcctttacggctgctctttgcctgcctgacctcaacttccacacttccgccttccggcgtatatttaacagcattgctcagaatgttgacgccaacctgccggagacgcagctcatccccaataaccttttcatttttcagcccgtagagatgaatgtcaatatgaatctgcttattctctgcctgcgggcgcacaagctctgccgcctctgtcaccatctccgcaagattaaacggttctgcactgagcgacatcttcccgctctcgatcctggacatatccagtacatcgttgataaggccgagcagatggctgccggaacggctgatcttatcgaggcactcccgcacccggtcctgttcgcccagatgtgcctttgcgacctccgtcataccgacgatcgcattcataggagtacggatatcatggctcatattggacaggaacttactctttgcctcattggcagctctggcattgtcaagggcagtctgaagtgcctggcgctgctgctcctcctcatagcgctgttcatcaacacggcgtgatatgagaatggcaagtttgtcttcagaatacggattatctacgtatatgatctgcgtggatgtccagtgataattcccgtctgagagcctctgtctcatctcaaggaatacctcctgtttcgtactgcccaatatttctttgatcctgtccggcgcaaaccggcgcctgtattcatctacatgatcgggatgaacagttgctgttatatctgagaagagttcgctgtatgtagtctcctccccgaggtggagcagcagtccttgtttcacatatataaagctgagcagatccctggtcaggttaacgctgacgatcacgggatatgcattggagatcgccccgacaagtgtcactctctcctgcagctgcacccgctctgcctctacttccttctgtttctcagcggtaatgtcatggaatgcggcaataagaacgggaattccttcctcatccagcgtcctttcaatgattccggccgtccatataaaactgccgtccgatttcttcatctgactttcaaatgtatgtttttcatcattctccgtcacgtccgcgaacatctgccggagcattttgctctcttccgggtgaaacaactcctcaaactgaattttctccagtatgcctgacattgcgtcgtacggatacgaaaggatattcaggccttcctcattgagctgcagcagccggtatggggcatctgcagatatgagggcgatcccctccggtatggcattatacagatggcctatgtattccgcctgatttctcagccttctgttcgttttgtttgcatatctcagataaaaaataacgagcgccaatatcccgattatgatgctggcaatgaggatcatagaacgcagaataatatcattcgtctggctgtttactactttttccgggatgatagaaacgaggaaccagtctgattcgagctttaacgggctgtaacagaatacagtctcctcccccatatagtcaaacaaggcccagcctgtattcgatccttccagcgcccccgcgaattccttcaggctgtctgcattattgtccggacctgacagcatatcgaacagattcttcattgtcttattactgttgtggtgaggcgaacgtatgagcacctctccctccgcgttgatcacgtaggagaatcctgcattgttgtaaaaggacagactgaagctgtccacaatactctccacttcatattccttcagaaaatatccttccgtgccgtccttgagcgtcacttttacaaagacgtcgaatacatttacgcctgtaacactgctgatatgaggattgataacaccttcctccttatctgactcccgcagcgcttctgccgcagtgctgtccgccggtacatctgattggatatcaccgccttcttccagatatagactgacgccgccttcgatgcccgcgtaactctgtacagtatgccggatatcttctttttgctccatcgtatagccgctcacataatctgctatattgcggatagaatctatgtcatcctgaagctgaacccgaagcgttgtgcatccctgctgggtgctttccatgatcgtctcaacggactgctcccacaactgctgttttacagcctcaataaaaagaaacgtcaggacacagagaacagccccgacgcaaaccgccgccagagcaatctttctctttgtccccctgcttccttctgttttcattgctgcgtacttccttccttatctgcctgcatatccagccagtccatgaccgaatcaagtgtctcccctgacagcagttttacagaagcctgagctgtcagtttccagatcggcagcttgagcatcccgtctgcccctatgacagtccggtcagaccgatagcatgaaacaagcggctgaatctcttccacagatgatggactgccctctctgagcggactgaaagacgcttgctggtccgcaaacttctgaatattatcagccccggtaaaatattccacaaactttaaggctgcatccttatgcccgctgtccgcgttcacactcaggcgggtatcaggattgatcacaacaagggaactgtcctcgagaaccggatacgggacaacctgaaattcaaaatccggctccatcttatctactcttcccgcagcccaggcgccggtaagcataaaaggggcttccccttttataaactgttccagatcatcagaagttttctccgtgccaagggctttctccgcgtctacatatcccttctgtatgaactcctccacgagtgaaaagccatctgacaggtaagtgcttattttcccgccgccttcattcagacttgaaaatacatccccctgccgtccttcctgatacacactgtaaaatccctttccgatggccagcgtttttagtgatatatcattattcgcaatgacaggagtcagcccgcggtccctgtaataatcgagaacttccctccactctttcagattctccggcgccttctgcccatgctcctccagaaggtccatattgcagtaaaggccgaatactgatactgtcgtaggcacccaatatatctttccgtcctcatccatctggctgatcattttgtccgtatatcccgatatcgtcttcatgcccgacagatccgcaagcttgcccgcctcagacaattccagcgccgcgtcatggttcaccataaaaacatcgtcgccttttcctgcagccatccgcttttcaagagcagtataataatcctctcctttcaggctttcatacgacacccggatgtccggatgttcctccataaaaccagaaataatttcctcgatcactgtgacattatctggctcatatttattaccaaaaaaagtgatatcaaccgtattttcgtccgcctttttatagttgaccaccttgttcttctcattacatccgcttaaaataaggctgcatacaagaagcgccgcgcacatgcccatcattattctttgtttcatctttttaacccccgcttactgatcaaaaaaattataacataataataatgtttaatccattcatttgacttctgatccaggtttttatagtaaactgtattcagcctgcaaattctcataaatatccattaccggctgacactgtgccagcgtcctgctcataatagtatcataatgtgtgatcatacagttgaccagaccggcgtcgatcagtcctttatcccgcatacgggaaatgatagtgattatctgctccttgctgtaggcccctttataactgcgggttccggccagtgcgctgacaatatcggccagagctacaatacgctctcctgtcgtaagatcttctgctgtcagaccgtgcggataacctgaaccgtccagtttttcgtggtgtctcagggcgatcctcctgataggctttggaatatctctgcccaggatctcctctgtaatatctacatgactgcgcatgatctccatatcccggggcgcaagtctgcccggatactccaggatctcagccggaatgcctattttgccgatatcatgcagcatcgcgcccacaatgatctgattccgctcttccgggccaacccccagatactgtgcgagctcgtttgagatactcgcggtagtcatcgtatgggtcaccgtatgccggctgcggaaatcaatagaaaatatcaccattccgagatagctgcggacctcttcatgggtaaaggtgatttcggactgcatccggttgaacacaggatcgcactctgcttcctccgccgaaaatgcagaaaaccgctccctcatcatgaagtccgccagctccggtttatatcggctgccgcgcccggcagatataacggaaagaaattcagagtatggccgtccctccatattcagccatatatcgagacggtctgcaatgtagatcagctgggcgatacttttattttcttcacttatatcatccagttccttaagcacattccagggcgtgtgatggtggaggaccgcatgggccagttctgacagcggcgtaaaattcttcacaaacaagtatccatacacagaatgtctccggatatcttctgtctcaaactgtactatgcggtcaatctcttctgttttataagcacccacatcatgcagggcggacaaaaaacaaatattgcgcactctggcagaatttgcctccgtcctctgccgcagcagacgggatacgatataggccacacggataccgtggtccatcagacgtatatccacatgattataagcacggcgtaaaagtccgatcatcgccctgttgtctataaagctggtattgtattgaaacatgtatttggctgcctcgaaagcagacacctttcttataattttacaaactgtaccgggaaactttatccctgccgtcccttcagactgacgatcagttcctcccccggcataggccgggcgtaataatatccctgaatatactgcacacctgcagaagcgatcatcttttgttccgctccgctctcaacaccttcggcgacgacactgagatcattgatcaccgacatgtctacgatcgatctcagcagtgcatattgcttctcattcgtcaatatctgctgcgtcagcgaacggtctatcttgatgatgtccacaggaagattagacagataattcaggctgctgtaccctaccccaaaatcatccagcgctatatgaatgcccgccttcctcagcttctccagcgtttcagccgcgtggtcaatagactggatcaggatgctctcggttatctccagcgtaatacggccaggctcaacattggcagcgctgataagctgcagcagatgctctgcgctgtttccgaccaaaagctgctgcacagaaagattgatccccatacgctgcacgcccagctcctctccccattcccgcataaaggaacaggcattagcgagcacataatcaccgagcgcttccaccattgcgttccgctcggccagagatatgacctggccggccggaaaatagccgccttttccgtccggaagacggacgagggcttctactgctttgtaccgtcctgattccagatgcatcagaggctgataccaaatttccaaagtcttctattgaatcgcgtcgctcagccgatgtaaaatatgggcttctgtgcgcagcatctcgtccagcgcatcattatagatgaccgtacttcttgccgacgtctttgaaaagctcatggctgactggagccgctcaagcagaataccgggcgtactgccatgtgccggataccggcaggccacaagacggatctgaaggggaatggacagatttccggccatgacaggggccgtcagcatctgctgcagccgagccgcaaaaacatctgtcttttcctttgtcagcgaaatgcccagaaatacatcgccgttgatacggtacagataagaaccaaaaggcctcgacagacgccttatcatctcatgaaggatctcatctcccacatcagcactgaataattcattatactggctaaaactgcaaatgtccacacaaaaaagactaaacggtcttttgggcgaataggagatcagcatttctgtatcccggaaatatttaggacggtttccgacattaaacaccggatcaaaataagccagctgttccaccttcttacggtaacggttaaaagttttggagagctctgtcatctcgaaatcagtatactcatcaaatatcacgtcattgtttccctcaatgagctgtctgcatttctcagtcatcatccgcacgggggattcctgcattacctcggcataatacgcatggatcagagattccatctcttctgctgcccggccagtaccatttttacagcgcgtatacttatagcgtgccatgacaaaattcttttcatccctgacacgtaccttcaacagtaattccagcgacagtccttttgcaaactcctcctgctggagcttgttcatcccctcgcgaagagcgataaggaaattgcccgaaccgagatacgcagctaaaaatggactgcggatgtactccttcagacgccccggtatactctgtaaaaaaaccgcttcttgtttcgtcccgatcagccgcgccgcctggctgtatccttccatggagaagtaaaacagcataaccgggctgctttcatctgaaagccagcagtccagcgcggccgtaaatcccttttggttatagagtccggtggctccctccattgtcctgagctgctttatagcgtgtctgcggtaatagtgaaggtatccaagccaggcaagtgccagcagaacgcacgccgccaccacactggcgatgatgatccatatctgctgcgaagggctcagccagccggatgacggctggatgctgagattccattggctcggcagataaaaggtggttttttccgcgtatgaaaaatcaatatcatccttgttctttgcaatgacttctttggcgccattctgcggctctacccgccagagctcatagtcatacccgcggtccggcaggtcatccagtttcagctgttccaatacatactcccagtcaagagccactgcgacctctcccagataagactctccacccacaaccggctgcaggaacaaaaacaccttttgttgttcctggtcaatatcaagcgccaccggcccctccacgaccagctccttgactactttagccagtgtatacgcataggaaaaatcctgcagatcacgtcccgcaagctcagcgtacttctcctcaggctgagcgctgactacggtgtccccgtcaaaaagacagacaaagcggacttcctcccgtgacaaaagcgtatcagacgcacgctcaaaccattccgtctcccctgtgccttccacaagagctgtcttcgccagggcatcggcttcattcatagtcccctgcagctgcagcacaattttttcattataataatataatatattttcagcctctctctgccgtatctttatcatctcgccgcgcagaaaaaaacctaatactgcagttgcagcaagaatcaacagtaccgcaccggcaaaaaagagaatgctccgtctgctatgcttcttcattataatcctcaattctgatgaatatgatagtatccttttccgttctgcttcacatggtaaagcgcctcgtccgcatcaaggaccatccgttccagatccataccaggttcgtatatggacacacctatgctgcactgtaccggaatattccggtctcccgactgtattttagactggaagcgcaggacgagaccatctaatacatcgttgagttccttcctgtcatccaggccagtcagcagcatcaggaactcgtctccgccgtaccgccctacaactccgtcatatttcttttcatactcccgcagaatatatcctatacttttcagcgcgatatctccgccttcatgaccgcatgtgtcatttatatatttaaggttatccatatcgacaaagaacagcgcctggaccatattccgatctgcattcttcagttgtgcctccgccttattgagaaacacggaacgcgtgactacgccggtcagactgtcagagaggccttccccggtcagacgcaggatttctttaaaatcaacattttcaggcgattcattctgatagattcttttttccagttcttccatcgaatgtacgagcatatctacaacgagcatttgttttgctatgtaattccgcacgaacatcatcagtacaacgcatgcaaatgcagtaaggagcgcaaccatcgccagagatgggagtatctgcgaaaacgcgcttccaaagctgaccgtacagagaatatcccagttcgtgttatccacacgctgatatgtcgtatagcagagacttccattttgaatactccagtaatcacccggatgcgcggcaagaagcagttcttccagttcgtctgatgtcgtgccgaaaagtatatcgtcccgcagaacatccatcacggagtcgccgtaaggcagccctgccgtagatgacatgatctgtccccgggtgccgatcaaagttgcgtcagcgcccagattccctgctgattcctccaggatctgcacagcttcatcaaagtagatcgcgctgaacagagctcctgtaatacttccctgccggtcgatcagaggaacagccactgtgtaattgagcgtcgtaccgtcagcgcctgccgcaaagctgtctgtaacctgccgctgcccggttgaaaacagccgctgcatgtaatccctgctggcgaggctggccggttcatccccgtcagaatagactatgatattttcatctacatagcagagcatcataaagccaaaatatggactcatctgatccagcctttttaccttatctatggcagggagtccgggatcgtaataatccggaaatccagccagagactccagcagctggatcgcttcgttgacccgctgtgatatttgtgcctggctgctgtgaagcgaagcttccgcatctgacttcatccggctgaccgacagcacgccccctccgaggaagatgatcgccacgaccagtatacagaacaccaggctgtaacgtatgatgggagagaacgatatcccccactgatctccttttttctttttatctttccgtctcatattaattaccggttctcctttcaggctgtttcttggaaccttatccatataattataaggcaacacttcctctttcgcaatagaaataaaaaaaagcctttgcagacttttgtcatacaaaggcttttcagcgtgggcgagaggattcgaacccccgaccttttggtccgtagccaaacgctctatccagctgagctacgcccacatattatatacattgcttatttgcaacgtatataatattaacgtatccagcttgttttgtcaatacacctgtcttactttttttgctttcgatgctatttctcgaataccgtctgttcttccaccggtgtcatgagcgccccgagcgcccgttcaacgagttcacgccttatctttctgctcttttcttctccaaggttcgggtctccgagcggatatgggatcccgactgcaggtacgatcctgtttgccccgatcgtcagtgagatcggaacaacggtagcgatatgtacgacagggatccccgcgcgttcgatctcttttaccatcgttgcgccgcaacgtgtgcaggtgcctcacgtggaagtcagaatgacagccccgatattgtcatccagaagcttcttcacaaagtctttgccgaatccctttgcatttcctgtcgatgtcccggtccccgtcgtcgtgataaaataatccgccagttcgccgataaccccctctttctccatctcgcgcagcacgtcaagtggtactaccagatccggatcttccgtgacaaacgctctgtcataccctccgtggatcgtcataaaatccgccttatccatatggtccatccccttgatactgtatatgccgtattttgtggcgctggaggattcgatatgatccggattgccctgcggcacgatacccccggatgtcacgaccgcgatcttgatcttgctcacatcctccaccggcggcaggggcggcacacggtcaaacaccggcatcggatattccgtcggacaatcttccccgttcatcttcttcacaagcagatcgaccgctctctcggaaccccgcttttcatgaaaataattgacacgtatcccccgttccagatacccttcctccgacggtccgagcagttcttctccctttaccagcttctctgcgatggctttaatcaccgggacagcctggcgcatgcccgccgcggaattcttcgtcctcacgatgatcagatctttccggaacatatcggcccccggattctcctcatacatccctgtcaatacagggataccgaatctttcctccgcggccagcgccatcgtgccgcaggctactccgtacctgcctgcgttaaacgcaggtcccgcgataaagaggtcaggtccgtaaggctctatcatacggaggatctcttctttcgcctcctcgagatgttcgccgaaataattgtcgccgcatacaacggtcgcagcgatctcatactcctcgccgaacgcctgcatgagcgcaagcccgggtcccaccgcgccttcccggagttccggggccatgcctgccgcctcttccccgccggctccggcgaaaaagttgttaatataatgaacgatctttatttttgacattcaaagctcctcccttcctagtaagtgcgcgcagccaggtgattatagccgttcgctatcgtggaggctatgatgatctgaagttccgcatcaatgcttccgtccggtttcaggcttccctcgtaaccgccgatcatcgtctctacaaattccagcgtgcctatcactttatccatcggcgggaaatgaatgataagattcccctgcccgcatgatactacggtgtcagcctcaggaaccgcgtccgcaagcgactgggacttcccgtcgcgcccggggaattcatcggttatgaggactactttcgcccccgccgcggttgctttcctgcagttcatcatcagatccgtatccggattgccatatccttcctccgtaatgatcacgccgtcaagcccaaggaattcaacgagcttgcccaccatatcagaacaccgctctttatcggccagaaatacattttcattcgtcagtatgacgccgataaagttcagatccctcccgtgccgtttgtacaggtcctcaatgaccggattgttcagatgatggaacgttgtcaccttgtcgcacggcgccacacaattgccgcttacgatcgccccatccatgatctctgtaggatacataaacgtgggaataaatttcttcgcgtcaactccgtaatagtacgtgtcatgaagcagtccctgtgactggagcatatggatatacccaaccttcgggagatccggatactccgcgatctgctccagatagggtctggtttcataggtgacgatctcgtccggcgtcagctccctcgccgcctctccgatatacgcggccaccttaagtcctgccagacggcctgccgtctcgtgttcatgggcgtcaatgccttcttttgcccggaaaatgacacacacattatttgtcctggaaaacggcgtatactttgccgcctccccggacatgtcgatgataccttcctgaaaccctacgatccttcccgacgtgacgaccgctgcccccacgagcgcatgcgtccttcccgctccgacctgtctgaccttgttaatgattcccggaaaaagccctccgtctccctccacttttacccggggctcaatgacatccttcaccggcgcgatccgcacagactctcccggctttgccagatccacgtccgccgacacgagccggtcgtcctccagcacaaggctgatgatctcctgcctgcatacgtagagtgtgccgttctccacataagtccgctctgcaaactgaacatcatgaataaatatttttcccagttccagtttcacttctttccctccttttcaaaaggggacattaagaataatgccccctcaagtcatgaattaactgccgatttctttataatttaataatagtctaataattcattttttgcaactcttttccggtatattggacatttttccgatatcagttcaaggaaaaataatcataacacatggcgtacggcctgcacttctgccattttccctcacctttcggcccgataaatctgccgttttcggcaatcttttttccccggaggtatacttgttccggacgtccttttaccggaaatccttcaaatgggctgtagtctattccgtgcaggctgtcttcattccggataacgccctcataatccggatcaaatattaccagatctgcgtctgaacctgcggcgatctcccctttctgcgggtaaagtcccaccactttcgccggcatggtggcaaaaagctctataaacttctgacgggtgatccgccccttgcataccccttccgtccagagcatcgcaagacggtcctgtacgcccggacatccgtttggtatctttgtaaagtcgccgagtcctcttttctttgtctcaaaaccgccctccagcgcgcagtggtcggaaccgaccgcctgaagccatcctttctgtactgcctcccaaagcgcatccacatgtttctgcggccgaagcggcggggcgcacacatattttgccccttcaaagtccggctttgccagatactcggtcgtcagagtgaggtaatgggtacatgtctccccaaatacaggatacccctgcgtataagcctccctgatggcctccatcgcttctttcacactgacgtggacgacatagagcgggcagtctgccgtcctggccagagcgatggcccgtttcgtcgcctcctcctccgccaccggcggcctggaataatagtggtacaccggctccgtatgtccctccgcaagatactttttctgcagcacattgatgatgtccgcattttctgcatgcaccatcattgtgacgccgcattccctggccttcatcatggccttcaatatagattcatcgtcggaataaaaatcagtgcccttgtatgccataaaaagcttaagtgttgacacgccgacttccggaagctgcgcgatctcctcaaacacagattctttcgggtccatgatgatcccgtgaaaggcaaagtcgacacaggcgattccctgcgccttcgccgcctgccttttgatcgcgtcaatgagcggcactcctttttcctgcggcgcaaagtcgacgatcgtcgtcgtgccgccggccgctgcggcatctgtcgtctcaaagaggcggccgccgaacgatccatagtgcacatgttcatccaccccgcccgggaagatcagtttcccttctgcatggatgatttcttctgcatcccggcttatgtttttcccgatctcctttataataccgtcctcaatatagatatccgcctcatactcatttacagaggtcacaaccgttccatttctgatcaatgttctcatagtaccctccttttctaaaaaggggacattccgcacaatgtccccttttgattcagtcactatttatcatacagtctttcatgcttccggtagacagacgcgtcgatgccttccagatactgtacaacttcatctacaggcaccacgtcacagaattttgcctccatgtcaaataagttccactcgataactcccggcacgcggtcgcctaccgttccttccggcacgatagtcttaaagccgtatccggtagaatccatgaccgtatggcgcacgcaggcacatgaggtggctcccataacgatcagcgtatcaacacccaggaaattcaacgtctgtgcaagatgtgtcccgaaaaagttagatgcatattttttatggatgaccggttcctccggctgcggcttgagcttcgggtctatctgcagccagtcgtcatttatgtcaagcgcgctcatcgggatcttttcgtcccatctcggaagatcccactgcttctcccctatgtacccggtcgtcgtgtggaagatcggcactcctgatcttcttccggcttccagaaccttaagtgcttccgcgcacacctcttctgaatggtcacacgtaaatacgtgcccttcgctcatccacgcttttgccatatccaccgtcgttatggcaggcgcctttccaaagcccatctttctcataaaaccgcgttctttatatatttttcttgcttctgcaaacgcccgcttaagcagttcctcatcaaactcataatgatccacaaacttatactctttattttctgccatatcacgatcctcctgatcaaaaatgttattcagttgctttcgcggcgccgcataaaagaaatattccgctgttgtttatttcttttattttctatgctattataataatcaatcaaatccttttctacaaccctatttgtctatatgtcagcatccatacactgacactttattgacacttttatttattttaatttattatcagtattttaatcgaattattttgtatgaacagtaaaacagagacaggaggaagatatgcgtacaaagagactctcccccctcggcttcctgatggaatgcctgaatatccagaccgtgtcgctgtcaagagaactccatgtggacgccagccttgtgagcaaatggaagagcggcgaccggagtctgaacagcaattccatgtattttgaagatatcatcagattcataatgaaagtgagtgaaaaatcagaccatcagcttctttcaaaggctctatcggaaatatatcctctggatggacttgaaggctctgcatccccggagccttttgtgcggaagctgcttttcagcgaaaaacttacgctgcccaacctgaaagaatttaccgcgccgggtatacagccccaaatacagatcggctcctgtgaacagaacagcggccgcaggcacgctgtcctaaagcttctggattatgcagaaacgctccccgtacccggaaggatcatctttattgactcggaagaatacggatggctattggaagatgaagcatttgtcaggcactttgcggaaaagatgaatgtgctgctgggacgtgggttttctgcccgttttgtcattcatttttcttcataccgccagcggtttgtccggttctttgagatgtgcaacctcctgctgttccaccgtaatgtggaatggttctactatgaatactacgatgaaaatgtattccagttctcccagtttatactcgacaaagccatctcgcttttaggtatctctgccgggcaggacaactccacgaccatggtattcacagacaccccttctatcatccggcactggacgatggcagaatcggtcatcagccgctgtgaaaagctgtttgtcaattttccggtggaaaaatgcgcggatgtggtggaatacatacgagtcatacgcaagagagggacgctctacgcctatctcccggcgccggcatttgtctcagcccagtcggaacttctcagtgagatccttacaggcaatcatatcgatccggccaccacagaccagtgtctcattgtaaaccagagaatgcgggatatcgtacacacacagttcaggggacttgaagacgcgccggaacggatcgtacagatacttcagctggaagaaatggagcggcgggcgtttcggaccccgttcatcagctgcagtctcactctgctggggggccggcaggtaaatgtgacaaaacctcagtatgcgcgctgcctgcgcagcctggcagacgctcttgacaaacatgagaaccttgagatcgtctttttatcggagggagataatgctccccttcctgcaatcccggagatgaactgctggtgcaaacagaatacatggatggtgcagatggatcagaaaggcttccgcctgagcgacgaggcaagtatcgtcaatgccgcatctgttacatttgaacgctgcatccgaaggataccgcctaagcggaaagaaaaatcttcggtcaccgcatatcttctgcagcttgcagatacactggagcgcagcggcgtctgaccataaaagtgagacagaccttttcaaatacgggcggttagtggtagaatatcctcatggcgcctcaccctagctgcgccttcgcgacaaagagatgacaaaaaggattggatgatatgacaaaaaaaatagcaataatcaacgatttatccggatttggccgctgttcgctcaccgccgccatctccgtcaccgccgccatgggcgtacagccgtgtccgctgcctacggcaattctcagtgcacagacaggatatcccagctacttctgcgacgactatacagacaaaatggaagccttccgttccgaatggatgaaaatgaatgtacggttcgacggcatatacaccgggtttgtggccagtgaaatgcagatccggcatatacacaggtttatcgatacattctgcagcgaagatacttttcttctcgtagaccctgtcatgggagacaacgggaatacttacgccatgttcaccgaacaactccggtgccagatgcgggaactggccttgcgggccgacatcatcaccccaaaccttaccgaactgtgcctccttacaggcacagactaccatacccttgcggatataaaggataccgggcatctgactgaatccattgaccgggccggcaaagaactgtgtaaagaaggtcccggtgagatcatcgtcaccggcatccgccacaaaagtgaaaacgggactgacatgatgggcaacctgtacatcacgaaagaattctgcaaattatcatctttcccttacatcggcggaagttactccgggaccggcgatctattcgcctcgtgtctcgccgcaggcattgcccgcggcgattccataccggatatcatggagactgcaggagcatttctggagcttgcccttgccgattccgtgaaagaacaggtcccccgcaatgacggtgtgaattatgaaaaattccttcccatgcttctgaaaggggcctgacccctctcagaaaaccggacgtcaaaaacggcctgcccttcttgcgaagtgcaggccgttgtccgttaaattatcaaaaatacaaatattcaaatgaaagtaaaactcttctgctctgaaacatatttcttaataattcttatcttggaatcttcttacagactatgctgcgcaaacattaactgctttcagcttgctgctgtctttcggatctgtctctgtgtcgaaagtcactttctgtccttcttccagagtcttaaatccgttagaaacgatcgctgaaaaatgtacgaatacatctccgccctggtcatctgtaataaatccaaatcctttttgtgagttaaaccactttactgtaccgctgttcattgtcagtacctccattttaataatatttgtatctgagataaaaaaaagtacctttacttgtaaatcatcctgaaacgacttacaaacataggtacgattcaaatctctttgattacttgcttagcttaacatgtatattacaaaaagtaaaggattattttatattattttatttttttaaactggcctgctcaaatattaaatatctggactttttaatacatccactttgatgttatgattatcaccaaacaaggaaaggactgatgaatatgaaacagaacatgcaacagggaaaagcgatcccgctgctcaccgctgccgggctctttgctgcgatgatcacacttatgacagcctatatcttccacataccttatgggacaaacggcggatatatacattttggagatactttcatatacattgcggccgtcctgctccccagaccttatgctctggcagcggcagcgatcggaggcggtcttgcggatatgctcaccgcgcctatgtgggcgccggccaccatcatcataaagatgctgatcaccctcccatttacaagtcacaacggccggatgctcagcccgaggaatgtggcggcgccgtttatcgccgctctcatatcagccgccggctactatctggcagaagggatcctctttggctccttcctgtctcctattgcctcactgaccggcagcgccgtgcagtccggcggaagcgccgttatctttctggccgccgccgcggcgctcgacagaatccacatgaagaaccgcgcagatcagctgctgttcctgcaataatgaagtaatatctgaaaggagataataaaatggcggatatcctatatacttacaaaaatcaggtctatgccaatatcacaaacaaatgcgactgccgttgcaccttctgtatacgaagccacgaagattccgtgggggatgccaagacgctctggcacaagacagatccctccctggaagaagtcatagccgccatggacgcatttgactttacaggctatgacgagctcgtctattgtggttatggagagccaacctgcgctctggaaaccctgaccgcatccgcaaaatacgcaaaagaaaagtacggtgtacgcatccgtgtcaacacgaacggactcgcaaacctgtactacggccgggacattatccccgcgctcgccgggaccgtagattccgtatctatcagcctgaatgccccgacaagcgaagaatacgataaagtgacacgcccccggtttaccggcgcgttcgatgcgctgctgcagtttgcgtccgaatgtaaagactatattcccgatgtaaggcttaccatcgtagatgtgcttccccgggataaaatagaagcaagccaggcgctggcagactctctcggcataacattaagaatacgtaaatacgcgtgacccaggccttctccttacactccacggtagatcaatattcaaaaagaattactctcgtcttccctttttcttaataagttgtctgtatgataataagaaaaagagggaggctgagaagaatcatatgacacaaacgacgattcaattaagtttttttgacgcaatactagacttgttgatgcccgggccgctgtatgcggcgagtcttatattaattggaattttgctgtttttatttttccgaaaggacaaaggactgccccggttcaggacagcatttggttcacttttattatattattatctgggcatcgtctttcgcaacgttgtcggtataccgacgatcaaagaatttatccggctggacagtctcggggaatctatatttaatcctattgttaactggattccgtttgccgatgggataagctttgatttcatactgaatatcctttgttttattccgttcggctttctctgtccgctcatcagcggcacatataaacaactaaaaaaagtgatcttcctcggcttcttactttcactcctgatcgaagtcagccagatgtttacactgtacagagctacagatatcaatgatctgatcacaaatgttctcggcacggccgccggttacctgtgcttcagacttgttgtaaaacttaggaccgcaataacgggcaaggcgtatactgactccgccgcaagtgattcctcacggtttctgcctcctttgatcacattactggcctttatcatcatatttatgatctagcttcatcctttttgtcggctgcatctgcggcgcgctcccatcctctgcttctctgggcatggacgcttatgtgaagtatgtttgtgacgataatgataataagaaaccacaaatgagaggagatgcagtgcatggaaatacaaagtattccttttcccggcaaggaaccggcagacgataaaacggcttctttagctgacattgcgtcacatatcagcacatggaagcctgaggctgaaatggagtttgtggaaaacgcggaagcatcataccaaaaaacggcagaaagaaacgacacctctgaaatatcagacgagagtaaagctgatacatcaaaagaggcagacgcagtcagacggatcgaacagctcctggcaaaactccggatatggcagccgcttttaagttctgattctgaaaaagaactggaacggttaaaagaactctatatgactattttgaaacagatcgtaaatctgacagaacacgacgaacaaaaaaggctgctcagcctgttggattcttacacattcgggaatctggcaaaactcgtggaaaagcatttcagcacgctggacggtttccttcaccagtatggagaacactggaaccggaccagtctgttcaacagtctttttagatccgccaccggcaggagtctcccgccggaaacagtcggccggctgctggatgaagtgaactctgcctggaacggcaaagagaactataaagagataatacatacaaagaacgtacacgagggtattttgtattccagacatttatctgaaaaagctgttccgtacagcaaagctttcagcggcagaaaattggtggaagccgattacctgagcggcacattcccggaatatggaaaagttacggatgcaaataagctggttacacatagcagcccaaggcaaaatatattcttccaggtgcaggacctacaggccgctgaaacatttctgacccattttctcggggaagggaatctgctcagtaatacgcagataactgcctggaatcctcagctcaggggatttctggctgcagatacctggttgaaatccattgtctatcttcaggcatccgggattcagaaaacactggcaggcagcatttcacgggcgatcgaccggatgatgctgttttatatcaacagtgcggcagcacaaaaatgtaccgccgcatcgtcatatatatcccatgactcagcctcgggtaaagaaaaccgtgagccggcagtatttgatatatactgccggctcaggatgctctgtcaaaaggaaccaaatgccggaaaagcgcttacctccatattgaagtatgcttacagtcagtacgaaaaccaagacagaaaggaaggtttctttttcgcacacccggacccgtcaaaaagcgactgtaaaaaggggttcctgctgttgaaaaaggactggcggcagtttgtggacggactgccggtttccatgcgcagaaaacgggaactggaagcctcttttatgagtccatggggtgattatgtctccccgctcaacccgctgtacaacccggaggcggctcatcccgccatcatcggcggtctggtcaccgccgcggtcgtgatcgtgttctgtctgtttacgtaaatgctcccattaagctctgtccagaatataatccacttcaaaatcttttacaggaaccggacgcgcaaacaggtacccctgtccattcgggcagtcaagtgatttcagaatatcctcctggcggcttgtttccacaccttctgcgatcatttctatatccagctccctgcacatctgtatgacattgcgcaggataatacggctccgctggtggctgaccagcgtttggatcaagctcttgtccagcttcagtgtatcaaaatgaatatcattcagtacagacagattactgtagcggataccgaaatcatccagagatatacgcaggccaagatcactgatctcctgtaccgtcttatagagcatggctgaacagtgttccaccgtgctctctgtcatctcaatctcaagacatctccttgaaaaatcatatttatccagaactttcttcatactgttgataatatcatcctccatcagtgtgactcttgaaaagttcagggaaatgatcaaatcattccgattccacttctccagcagtctgcatacctcttccaaaacgaaaaggtcaatatagcggatgatcccgtttgactctaaaacaggtataaattcagaaggcggcaggatgccgaattccgggtgctgctggcggatcagagcctccgcaccgatccatttgtggttttccagatggtatttgggctgcagataaacgacatactcccctctttggatctgcttgatcagatttctaagcagccggcggtgctgcgcatcatcactcccatgcatttcatcataatgacgcttcttattcaacttcatcacatcatctgcggcatggatcaatgccgccagatcatgttctacactgtcccatgaaaatcccagagatacactgaaattttcatttttctcgattttctcccgcagcttttgaaccttgtcctccagcacggctttttcactattcacggcaatgatcaggaattcatccccattaaaacggtaaatatccgtctgcgcaaagatcattttcatcagatttgccagatggcggatatattgatctccggtaacagtaccataatcctcattgatcttcttcagattatctatattggcgacgatcacaccgagtgaacttacctcctctgtctgataacgcggcagattattctcataactgtttctgttcagtacatctgtcagaagatcatagtgattggcatgaagcgcagcctggaacagacggtggcgtttgatctcattgactataaaaccggacagggattccagaaatgaaacattctgaaaattggcattggtattatctatgaccagacagccgtactcctccccatgctcctccagatggatccagtgctgattttccacatgatggctctgcatcagctggtacatgtcgaaagactctccgatcattgcctgcggattctccagcttcaccggttcgttccacttctgcgcactgagccatgcgctgagcactgccacctcctcttcgctcagtgtccattggtcccctgagtccccgacaaaccattcgctgttcagtgcataaagaccgctctgttcatccatcatccagatccccgcatgatatgccttgaaaaaatgacagatcgtctccagaatactctgcatcgcctcatcaaaacttactcgctcctgcatatgctgaataccgctgagcagaaaatggctctctgtggcgttactttccatggaatccacaatactcttatcattggatatgtcaacggcgatcgccagtaaaacaacctgctgcttccatgtgatcagtttatttttgatgagaaattcctgttccagcgcggtattcatgtccttccataaatagaatttatctttggaccagtttgcctttgcacaaaacggacacggcgtcttcctcctatgcatgatctcatagcactttttatcacggcactggcttttcgtaagcccgacacggtcataaaacgcctggtttcccaagagcagagcatagctgtccggatctacaagataggcgatatcgccaaactctcccagataggtatcaaaatccttcttttccaacagctccagattttcatagcctgcctccgcaccttccgccgccgtcattgactgaagttcttttagatccagcttgggctttacttccctgttgtaatactgatataaacctttctgtgaatttttcacctcatacagcgtcttatccgcctgttcaaacacagtctcataatcactgctgccttttatcagggtaatgcctgcgctgaatttaatatcatacctcttatcctcctgcagcttctgatacagatccatcaatgcatcatcgacctctttatcagacgtgatctgttccataagaacaaggaattcatcaccgccgaaacgtcctacgacacagtgctcgtgaaagactgccttcagatggtctgcaaacagtatcagggtatcatcgccggctttatgtccgtagctgtcattgatatctttaaaattatcaagatccaggatcagaaaggcccgcagttctgccggttcgcggagacattgaatgatctttgattctgcgctttttttattatacacatccgtcagctgatcgaattccgattcatagcgcagctggaagctgcttttcttccgttcatcaatatccgtcagatacatcagcgccatcagttcattctgaagcggctccttaaacagcaggatttctatctccatccacatcattttattctgttctatgatcctgcggaattcatatttcaatctggtaaggccgttttgataagactgcctgaggttatcccggtccatcagctccatataacctctgcggtcctccggatgtacgaccttatgaatgaaacgtgtataaagctgtgtataggtcatctcttcagtcagttcattataaaggttccagatgccgcccattccataaaactggtcctgagttatattaatatgtccatatgccttcttctccgataacagcatatgataaaactgcgtttccttcagatatgttaaatactcctgcttttccctggatatgtcttcgataaaccccaggatgacaggccccttgtcctctattttttcataggaactgaactgaaaacggacccattccccactcgtcagcctcacttcgtttatggtacggacgtgctgcttcagcgttttatgaaatgcatgctgcagtttgtcatcgtccgccttgctcaatggcaggaccttttctgcatactcagaagaatatgcagaaaaagtaagcaccttaggaaaacccgaaaggatttttttctggttgaccatatagacgatctggtttttaacgtctacgacaaaagcctcctgccggatctgtgtaaataaaatgtgcagcagctgaagcatatcctcattttttgttttatcaagtacaaaatcacttacatccaatgacatgcagcagtaaattccatctgcttcgatcagtttcatccgggtataaaaacggtgctttctattatgtacttccgcatcatgaagaaattccctgctttgaatatcctcctggtatccctcgaaaaacttttctgtagaaagtaaggatgaaagactgtttttatatttatatctgacatcatccctgctctgctgcagcatcgaataaaaagcggcattaccatacaatatcgtgagctcagtatccctttttaaaaagtaacaggccaggggaaaatattccaccatatccttaagttgttctatatattcatccgataaaatcgcatcatattcattcataacaatctctccttgtcttatctccataatctgcaatcagcagcattttaaagtataattggtcttctcatccggcaagctttcacataaaacagatcatccgctcaatcagcattgtcctgccggcgcttcttcaatgaagaacaaacgctttctatactgctattattttacaacagatttccttgttttgaaagaataaaacgtgcttgacagcgtttctggtttttgtatacagaacggactttctgtttatgctcaaaaaatgcatttagcaatacaaataaaaaaagttgaataggcaagggcagtatcacagggatactgcccttgctttcaactaaacagatgcgaactgacttctggtcggaaatttgggggattccccccattcatgactaatcatttgcaattttaccatgtggggataaatcttacctctgttcatcaattcctttggtgcaccttgctcagcaactgtaccttcagacaacacaacgactgatataaccgcaaacaaataaaatcattttttctttgtctccaaccgggacatattatgaaattcccctgcaagcattacgatagctaaagctaaaacaagtaaatctgttaccgccggagctagaaatacaccatctatatccagtccgccaatttgtggaagaatgattgcaagcggaacaaaaagaatgatttgccgcattaaaaccaaaacacttgcttttgacgccttccctaaagactgcattaaagtaataaccataagtacaaaaccaagtagaatataagtgctgaacaaaatacggaagtctgtcacaccctggcttacaatatccttatctttgataaaccatgaaagaattgttccaggagccagttggacaggtacatagaaaatcagtccaatcactgtcgcaccaataataaatgcttttgtgacctgttttaccctgtcatactgctttgcaccgaaattcgttcctgctgccggctgaaagccttgactggcgccccacatgggtatgagtgtaaatgactgaatactcaacgcagcccccaggataatctgccatgtttctcctccatgttttgctgctacgttataaagtgttgtctgctgtactaatgtcataacctgcatgagcatagcagaaaaaccaacaccgaagatctcgggaataagagagctttccactcggattttgtgaatacgaaccagtttgctttttttcaaaaagtaccacagagtaatagcagcggtaataacttgagcggtaattgttgcataggccgcaccttctacgccttttccctgatttttcataatggtaatcataatcgggtcaagaataatattgagaaccgcaccagtgccagtaatcagcattgccttttttaagattccttctccacgcataatcatgttggcggactgcccaaaattcacgaaaagggaacctgcaaaaataatgcgcaagtagcgttctgcggtattaaggatttctccctctgcaccacttaatgtcagaagttggcgtgtaaatatcattccaagaacagtaatgataataccaaaaatcagatttaacgcaatcaagtttcccataatcttatcaattatgccttgattttttttaccaaccgcccgtgaaagaacagatgctgaacctacaccaaccaatgtggaaacgccggtgtttatcagcgtaaaaggataggaaacggaaaccgcccccattgcaacctcattgattagctgtccgacaaaaaccctgtccataaagttgtatagcccgacaaccaccataccgataatagccggtacacttagagacaccattagctgaaacggtggcgccgtcagtaattcagtacgggtatctgttttttgtgtcatgatgacaacctcctttaaaattttttatgatatgagggaaaaataatcatcctctaatatccctatcttcgttaactctgttttcgtaagttagttttagctaaccaatgtgccaaatataatggaaagcatatactttccattatcgaatctaaatttacttactgccccatgattttcatccatccggccgtgtaaaaagctctcatttcttttaaataatattccgctttttcaagtggcatttcatgtataatcaactcaaaaaacgttttaaacattcccgttatcaacatatgctctagtcgttcatcaataggaggggaaggtctgcccagccttttaagtatttccagatagtcatgtgtcccctttgtttctacttccgccatttcatcaatgaggtttgaaaaacgcgttccctctgatttgcagagaatgatcttaaattcattcagatgttcgtaagcatatacaagcatatcgtgcatacatgcgccggatatatctgtaagattgtctggttgttcctccggaggtaaatcagcaaactcttgctgtgccttgcaaaatctattcataatataatcgtactgttccccaactagcgcctcaaataattcctctttactgttgtaatagccataaaatgcacctgttgtcacacctgctattttaacgatattccgcaaagaagcggacttaaagcccttttcaagaaactcctgcatagctgctttacgtaccatatctagtgttgtttgctcctgttcactcataaaatgctcctgtttataacgctgtgatataacactgttatattttatgccgcattaaagaatttgtcaatagtaatttgaatttcttctgaaatgggaaatgagttatttcgaaagacccaggctcccgctgcgcattgtagagatcatcacagcttcttcaaacgtaaaaactactaatcatctttcctcatactcctcacgcagataaaatgactattgctgttgcaatgagaaactccgaaaaaatgattgatggattgccaaagccaaaatccagagacagcagaaaaaaataatctgacgagttagaacttcattgttggatgtctttttgaatggtataatgagtgcgtaagaataaataaattagcaaagggggaaaatatgttaccaatttctgatattttaattcgctcaataagtggatatgtgtttatatttccagttcttatattgtatttctcattactcaaaaagtggggaagaaagcagaaccttatccatattgtaactgtatttttgttttgttattaccttttcggtattttgacagtaacaggtattggctataccagcacaatgtcgtttcgtccgagaatttctttaataccttttctcagtatgataagtggtccgatagatactatactgaatgttgttctatttgttccctttggatttttcttaccgttactatataagaaatatcgtaacataagaaatgttatattgactgggtttttgttttctttatctgttgaaattgttcagatgtttgattggggtgcaaccgatataaatgaccttataacaaatacggcaggagtatgtttaggatatttggcttattatttgctatcaaaagtattgcctgataatttaagaaaacaatttcaatctaataatgtcaatgatgtagttgtagtgcttttatttgcaatttacatatttataatcatggtaacagttcaaccttgggtaattcatagtctactcaatatagaataagttttaatttgcaatatttaaacaagcaggacttaatcacttccgctttcatgatttgcgacactattctgcctctatacagcatgctctcggaattccagatgcttatataatggaacgcggtggttgggaaacggacggtacgttaaaatcaatatatcgtcatacgttgaaggataaaaaaaagaaatgaataaaaaggctaacaaacacttattcaacacgaaagcaaaaaaccgacgtaaatacgtcggttttgcaatgccgcagaccggaatcgaaccggtacgggagtataagtcccgcaggattttaagtcctgtgcgtctgccagttccgccactgcggcatatgggacctatagggctcgaacctatgaccctctgcttgtaaggcagatgctctcccagctgagctaagatcccatataacgacccagaagagactcgaactctcgacctccgccgtgacagggcggcgctctaaccaactgagccactgggcctaactattactactttgaaaatttaattaattgcttaaaacaacgcatgccgcagcacttatcctgaaatacggacttagtgctgagacgctgcagtggaccctcggggactcgaacccaggaccgatcggttatgagccgattgctctaaccagctgagctaagggtccaaaaacttataagtcccttataggaactaagccgttgaccggacttgaaccggtaacctgctgattacaaatcagctgctctgccaattgagccacaacggcaaatcaaaaatgactccgacgggaatcgaacccgtgttaccgccgtgaaagggcgatgtcttaaccgcttgaccacggagccaaaatacttatatttaaacggcctgtctcatggagtgaccgaaaattataatatcataaacctgccgtaaatgcaatactttttgcgcattttttaaagaatttgtcccttctgtcattctttaccattgcataaaaatttattcatttccagcttttgttactataatataaacagtttctccatcgtagtatccagcagtcttgcaaaagaagttcctgatatgtcaatcattaatacgcgaatacattttcatatccacgatcttcccattcttgaccgcatttttgcgcaaaagtccctcaaactgaaatcctgctttttcaaggacgcggcatgaggcagtattgtaagaaaaaggctccgcaaatattcttataatatttgtatgttcaaatacataatcgcacgtctttcgtacggcgctcgttcctaacccttttccccagaaaggctcaccgatataatatcccatctcggcagtgcggaagtgaatgttaccgcaccggaagaccccgatacttcccaccgccctgtcatccgccgtaatggcaaatgcaatcgtttcctccgggtccgcagccagcatggacgctatgaattccttaccatctttctccgtgtaaggatacggcataccgtctcttaaattatcctggaccttcttattattcagcatcctggaaacatctgccgcgtcttccattctccagcatcgaatagcacattccataacattcctccattctcttttgaaaattataccacaagtatatattaatttcttttttgtttaataaaatccgtctgcactccatcatctggatacgttgtattaaagggacttctataagttatttggcaggctggcctggcagctgcgcgtcagaacctgataaatattcagatatctgaccgaggtactcttttctttcctgctcagtaaggctgtcgatcccgcccagattcttccacacggcattgtggaaaccgacggcctcaaacgtagctcctattaaggtgccatttatggcatcaccaaatttatgtatcaaattgtcagttgaagtagaagatgttgtaaatatataggtatcctctatgctgcgcaacgcatgaagacctgtatcatcactgtaatatgccgaatctttcaacatgaccttatctaaaaatccgcgcataacagcgggcatatcataccaccagacaggaaaaataaatataattctgtctgtatcatccaatatttcattatatcgctttacgagcggatccgatgttctcccttcaccgtacagttttaaatcttcctcagacataacagggtcaaatctgtctttgtacaaatcaatcagataacaatcccccgctgctttctcggcttcctccaaaacagccctgttaaaagagccgtcccacggatgcgcatatactatcgttgttttcataatgaatctcctccttttctaaatgtcaataattttatacttatgttttgaatacggcaatatcttattcaatatgtcctctgtttttactttcatatatccggtcgtagttccatcgctgcagccataatactccgtgtctgcaacatccttatcaaatattacctgtattgtcttgtcccagtcgtgcaatacactgtaaacagtcgccgcaccgatcttcgtttcaagtatctcttcaaataattccttcggcgcaaaggataccctcggtatgttgagctgttcacagaatttctttgtgtcaaacggtttattatctgttgtaatgaacaaataaaacagtgttttcttcttattgcataaaaacaatgtcttaaccatatccatatccagccttctgttgatcagcacacagtcctccattgtaatggtttcgtccgtatccaccctctcataaggtacttttaattcaccaagaacctgatatacctttttctgcagcgggcttttaaagctgcccggctccgttgttctgatctcgcttacataaaacattatatatccacttcctttggtatattgtgattttacttgccaactcagggtatcttcagctattattgtatcatatcattaaaaattacaataacgaatgtttttcatgttagtcatgatattttcagatatatcaggaggcagacactatggacatgaatattcaaaaatatatggcatttataaaaacagtagaatatggcagcttcacaaaggctgctgagattttaaattattcccaatccggcatcagccggatgataaacgacctggaaaaagaatggaaggttatccttctggaacgcagaaaaaccggtgttaaactgaccagtgacggaatgaaactgctcccatttgctaaagaagtgtgtcgtaaatacgaactgctgcagatgcaagtggacgaattaaatggccttcagtctggttttatccgcgtaggtacattttcaagtgttgcaacacactggcttccgaatatcatacatgaatttcagaaatcataccctcatattgaatatgaactgcgtcttggaaactacagtgagattgaagaatggctgctggagggaagtgtagactgtggcttcctgcggcttcctgtccgctcagatctcgatacgcttccgttggagcaggacgcgctgctcgcggttctcccggtctcacatccgatggcagattgtgacagattccccatctcttcattctgcagagaacctttcataatgcttgaacgggaaaataatacagagattgcggatatattcagtcggttttctctgaagccacagacccgccttatcacatgggatgactatgcagttatgtccatggttgaaaaaggtctcggaatcagtatgctccatcagcttattttgaagcggacgccctacaacattattgtcaaggaactggatcctccgatatatcgtgatatctgctttgcggtgagaaataaaaagaccgcctcactcgcagtgaaaagattctctgaatacttgaagtaccggcaggacagttttatctaaatgaacagtaatcctttatcagttcgcagagtctgtctcccgagcacaccggcaccactgcagttgtatgcctcaactcaacatcttccaaaatattttctcctgccgtcagtacgagcgccggtatgacgtcataccgcggcccaaacagcacttccagatattcactgtattttgccgcctgttcaatgtcctcgtccgtcttttcattcttcatcttaaactccagagaaaagaccttctcatctgtcacaagtatgacatctgcgtatatgcgtatggtcttcgcacgcttaatacggagctcaaaaatgatctcccactctctccatatggtatttggcagaccgtctgcaataaaatcaccgaacagattctgcatcgtattataagtgtcttcaaaggaatggaataatcccctcgtatcgttcagattccgtccgatatgccggcatccctgttttagtctgccgatgaactcatcaaaatcaatgtctaaaaactcgccggccaagctgtagtacccgcagaaatcttctattccataatggggcacattctggcgtatcaggccgtgccaccggtattctttatcctggtaacagagctcttttatgtatggtgagccgtacagataacgattaattgtctggcgtgtctctcctgtatatcttcctatttcctttgcctttatcccctcataactgcaaatgaccgaataaatttttctttctgcaacgtccatccatacacacacctttctcttattcttgcaaaccttctccttttcacgtatgctgtgtataggacatatcgtataaaccagctccataacagatcgttacggcggcaaaaaggaggcattctatgacaaactttatttttgaaaacacatgggaagaaaatgaagaggcgatcaggacaaaaaagcttgccattatacctgtgggaagcactgaacagcacggacctgcccttccggtaggaacggactggatcatcgcacagtatctggcagagatggtcggaaaaaggaccgacaagggcctggtgaccccggttatccccttcggccacgcactgtatcatgctgactttcccggaacaatggcagtatcccagacaacacttaccgcttatgtgtctgaagtctgtcagcagctcatctcttacggcttcacccatttcctgttcatcaacggacacggaggcaacaacaatgcgctgtatgacgtgggccagcagctgcggcttcagaacattccggctgccaatatccagtggtttgaagttgccggtgaccttgacagcaagtggggacttatcggacacggcgatattacagaaacgtctgtaatgatgcacatagctccggatactgtcaaggtggaacgcgcccatattccagagaatcagaaaataggcaatatcaaacttctggatcttcaccggggtgaattcgagggcgccggcgtctatctgaacttgcgtacgagggatgtatcaaagaccggtgacctgatcgagcacggacattcctcaggtgttgactacagccgcagtgcggcggatgcttccgcggaacttggcagagaagtctgtgaggctgtcgttgattatatgttacgcttcatagacgagttcgtggagtttcaatttgaataccaaaagtaaacagcagagccatacaggaacacccggacatgtacgtccgggtgttccctgcgtcattcatctgtctgctccagcattctctgcaaaagtccggcgcatttctcccggacaatatcaagctgttccggtgtaagatcttccacatgaatcccgcaggtacacactacagtgcagttccacctctctgccgcagcctccgcaaacatccgcgctatcacgtcatccttatgccccatagcggataataccgaagtagtaacaccaattccttctccggtaagactgggcctcgctgcagacattacagcgcagcctacgtgaggggaatctcctccatacacagccaatgtgcagtccttccccatacggatcacatcacagtatatataataaccgttgaataactcttctttcagcatttcttttccggctcccccgtccatggtataaatttatcgtatgagatcccaaactgaagcaatatcttgcccacaatatggttgatcatatcctctatcgttccggggctgttgtaaaaggtcaaaaccggaggcacaatgacgcagcccagctcagatgcctctttcatgttccggatatggacttttccaaacggcatctctctcggaacgagaacaactttccgtccctctttcatacagacatccgcagcccggacgatcagattttccgcatatccggacgcgatcccggcaagtgtcttcatactgcatggcaaaacgatcatgccgtccgtcacgaacgaaccgctggataccggagcttccaaatctcgttcatcatatacatgatctgcaagttccaccatctcctccagcggaatactgctttccagttcccatgtaagttttgcaccgtcacttaagatcagatatacttcacagccttctatgcttttgagcgctttcagaagataataactcattatcaccccggtagcgcctgtcacccctgcaatgatcctcatttcttctctcctgttcctgtcagaatccatatttctcccaattatcaagcacatgcttctgcagctcttccgggtatcccctgaaagacgcctccacagggcgctgctcctgcggccatctgtggaacggtgtgagacaattataaatcacccttgtggatatagcctcactcttctcctctgcgcttaagtatgccacaagcgggaagatatactggttttctataaccacccttctgtccggatgatgccgggtcgccagcgcccatacaagctgtttgatatcgcctggatcaacatcgtcgtccacgactaacactttcggaatataagagccgccctttgacgcaaaaactgcctttccgatatcaacagccagttgttcgtcgtcctcctgcttccgttcacggtcaaccgacacaacaaaccagtgagccgccgattccatcggaataaagcattccctgatcggaaatccctgcctgcgcagtacattctgtatgctggcagctatactcatgccccagttcgtatggttttcttctgtcggaactccggccacacagacaggcatgacaggattatcccgatgtgtcatcgctgtcacatgaaagcacggtaccggcttactgcgcccggcccatacatatcctccatactcacccatcggcccttccggaaccatttcctccaaagaagcaaacccttcaattacgatctcgctcgatgcaggaacaagaagatcgtgcgtctcacacttgacaacatccacaggttctttgtaccagccgccgatcacttccccttcattgacaccggacaggagcgggtatccggcgatcatcgcaatggccgggtccaccccgaggcataatgcaaatggcatctcctccccgatctccttccactgcgcatatattttaccgaaatcctgtgtggggatcacgacgccggcaatcgtccggggaccgtccagcattgcgcgcgtgatagcccagttcacccacgaaccgtcaggcgtgcgtgcaatgaagatcccgtatgtattgatataacgtcctccgtccccataatgaataaacggcacaggaagctttgtcaggtctatgtcttcgccaaatactttattttccttacatgctcctgtctctacaagacgagacggaatcggctccacgtccggaagatgagaccaggcctccacaagctcggggccagacatatccacaggcagcccaagagaaagcgccacccgcttaaatggatgttctttatcagggctcagccctaccggcgcccccagcacctcaaagccaggcgtacaatctttaatattcttaaaaagcggggccggggccggcagatcgtacgcatgtctcgtgatcgcactcatctccagattccagtccacctcctgtgtcaccgttactatttcattttcttccttcagtttttctacatattcccggaaacttttaattggctgcatttctttacctccctgccatcattgttattaatactgacaatctctatgattaaccataccataaatctataaaaatgaatacctctcagtctacaatattctgtaacatcaatatgctgttttccgtcttacctcccgaaggcaaaagtgtacccatattattaccataacaaaagatcctgtaaacataaatgcttacaggatcttcacagctccccgagttgggcttgaaccaacgacccttcggttaacagccgaatgctctaccactgagctatcgaggatcacctatattattatatccccttacatcgaacctatgcaagaggttttatttatgtaccctgaaaactgcatacaagaaataattcatccattacctatccaccttttcgcttcgagatgcgcctccgtcattcctgactccgcgctctcttcgctcttggtcatgccctcgaccgattagtagcagtcagctccatacattgctgcacttccacctctgccctatctacctcgtcgtcttcaaggggtcttactgcttgcgcagggatatctcatcttgaggggggcttcacgcttagatgccttcagcgtttatcccgtcccggcttggctactctgccatgctcttggtagaacaacagatacaccagcggccagtccatcccggtcctctcgtactaaggacagctcctctcaaatatcctacgcccacgccggatagggaccgaactgtctcacgacgttctgaacccagctcgcgtaccgctttaatgggcgaacagcccaacccttgggacctacttcagccccaggatgcgatgagccgacatcgaggtgccaaaccactccgtcgatgtgaactcttgggagtgataagcctgttatccccagggtagcttttatccgttgagcgatggcaatcccactttataccaccggatcactaagtcctactttcgtacctgctccacccgtcggtgtcgcagtcaagccctcttttgcctttgcactctgcgaatggtttccgaccattctgagaggacctttgagcgcctccgataccctttcggaggcgaccgccccagtcaaactccccacctgacattgtcccccagccggttcacggctgatggttagaaatccaatactgcaagggtggtatcccaacagcggctctgtgacgactggcgtcatcacttccttgcctcccacctatcctgtacatgcaataccgaatcccagtatcaagctggagtaaagctccatggggtctttccgtcctggcgcaggtaaccagcatcttcactggtatttcaatttcaccgggtgcattgttgagacagtgcccaaatcattacgcctttcgtgcgggtcggaacttacccgacaaggaatttcgctaccttaggaccgttatagttacggccgccgtttactggggcttaagttcaaagcttcgcttgcgctaacctctccccttaaccttccagcaccgggcaggcgtcagcccatatacttcacctttcggttttgcatagacctgtgtttttgctaaacagttgcttgggccaattctctgcggccagatctctctggcactccttctcccgaagttacggagtcattttgccgagttccttaacaatgcttctcccgtcggccttaggattctctcctcatccacctgtgtcggtttacggtacgggcacgatataaacgatagcggcttttcttgacgcatggctcacatacttccctactttaagttcggtacgcatcacggatttggtttgcacaccggatttgcctgatgtacgcctaccccgcttgcgccggtctttccattcccggcttatgctttccacacgtgtccccacagttctgttatatcgtggtacaggaatctcaacctgttgtccatcggctacgtctttcgacctcgccttaggccccgacttacccagagcagatcagctttactctggaaaccttagatattcggccggaaggattcccaccttcctctcgctactcattccggcattctctcttcgatgcagtccacagctccttacggtactgcttcctcccgcatccaatgctcctctaccgatgtacttcgtacatccctgagcttcggtagtgtgtttcagccccggacattttcggcgcaggacctctcgactagtgagctattacgcactctttgaatgtatggctgcttctgagccaacatcctagttgtctttgaaatcccacatccttttccacttaacacacattttgggaccttagctgcaggtctgggctctttccctttcgactacccaacttatctcgtgcagtctgactcccatacatcatctacgcggcattcggagtttgatattcttcggtaagctttgacgccccctaggaaattcagtgctctacctccgcaagacttgtatgaggctagccctaaagctatttcgaggagaaccagctatctccgggttcgattggaatttctcccctatccacacctcatccccacccttttcaacggatgtgggttcggtcctccattgccttttacggcaacttcaacctggacatggatagatcacccggtttcgggtctactctgactgacttattcgccctattaagacttggtttcccttcggctccagaccttcagtctttaaccttgccagccagcgtaactcgccggaccgttctacaaaaagtacgcggttcaccgcataagggtgttccacagcttgtaaacatatggtttcaggttctctttcactcccctcccggggtccttttcacctttccttcacagtactatgcgctatcggtcactaaggagtatttagccttacggggtggtccccgcatgttcccacaaggtttctcgtgtctcgtggtactctggataccgccatgtcagtcagactttcgcttacggggctttcaccctctctggccggctttcccaaaaccgttctgctactcttcctgaatcaattgtgcggtccgaaccccagggtgcacgcaccctggtttgggctcttccgttttcgctcgccgctactcgcggaatcacatgttgttttctcttcctccggctacttagatgtttcagttcaccgggttcccttccttacgttatggattggcgtaaggatagctgaggtttcctcagctgggtttccccattcagatatctccggatcaaaggatatttgctcctccccgaagcttttcgcagcttatcacgtctttcatcggctcttagtgccaaggcatccaccatatgctctttttagcatgaccaacatgctcaggagatacgggtgtgtctccctcgctacacatatctagcgtgatatgcgttggttttttaggtttgtttttttgattcgttgtctcgaatataaataatgttttctcaccggacgtaacgtccagtaagttttcattacctcggatgtcttgattaaataagatatttaatctttatttctttgtatgcaattttcaaggtacatgcttgatgcgcggcatgtgacgccgtggacatcaaatggagaatacgagattcgaactcgtgacctcctgcttgcaaggcaggcgctctcccaactgagctaatcccccgtctggtgtttgttctgttttttaaaacttaaataggcttaagtgggccttacctcctcaggatcaggccttacttagtgggcttaagtggactcgaaccaccgacctcacgcttatcaggcgtgcgctctaaccggctgagctataagcccgttctctggtcttttatctaaaaaaggcttccgcctctttttcttttttaaagctggcagccacctgctctcccacaccgtctccagtgcagtaccatcggccgcctgagccttaaccatcgtgttcgggatgggtacgggtgtttcccccaggcgcatcgccaccagcagtcctttttaaacttttgaaggcttaaaaaagctcgtttagttgttctccgtgagtgcagtctttcctctacctcgaatccacttcgttccttctcggtagactcaagccttcttatgcatcctgtcttccattcctgctcctgcaagcccgcttgcgtcacaggactggcttccagtctgcgcactcactccttgaaaactaaacaataaacaacaacccctacttcttcttttccttagaaaggaggtgatccagccgcaccttccgatacggctaccttgttacgacttcaccccagttatcggtcccaccttcgacggctccttcctttcggttaggtcaccggcttcgggcgttactgactcccatggtgtgacgggcggtgtgtacaagacccgggaacgtattcaccgcgacattctgattcgcgattactagcgattccagcttcatgtagtcgagttgcagactacaatccgaactgagacgttatttttgggatttgcttgccttcacagggtcgcttccctttgtttacgccattgtagcacgtgtgtagccctggtcataaggggcatgatgatttgacgtcatccccaccttcctccaggttatccctggcagtctctctagagtgcccatctcaaatgctggctactaaagataagggttgcgctcgttgcgggacttaacccaacatctcacgacacgagctgacgacaaccatgcaccacctgtcaccggtgttccgaagaaagagtacattacatactttgtcaccgggatgtcaagatcaggtaaggttcttcgcgttgcttcgaattaaaccacatgctccaccgcttgtgcgggtccccgtcaattcctttgagtttcattcttgcgaacgtactccccaggtggattacttattgcgttggctgcggcaccgaaaagctttgcttcccgacacctagtaatcatcgtttacggcgtggactaccagggtatctaatcctgtttgctccccacgctttcgagcctcaacgtcagtcatcgtccagcaagccgccttcgccactggtgttcctcctaatatctacgcatttcaccgctacactaggaattccacttgcctctccgacactctagcctgacagtttccaaagcagtcccggggttgagccccgggctttcacttcagacttgccatgccgtctacgctccctttacacccagtaaatccggataacgcttgccccctacgtattaccgcggctgctggcacgtagttagccggggcttcttagtcaggtaccgtcatcttcttccctgctgatagaagtttacataccgaaatacttcatccttcacgcggcgtcgctgcatcagggtttcccccattgtgcaatattccccactgctgcctcccgtaggagtttgggccgtgtctcagtcccaatgtggccggtcaccctctcaggtcggctactgatcgtcggcttggtaggccgttaccctaccaactacctaatcagacgcgggcccatcttacaccaccggagtttttacccctctaccatgcggtactgaggtcttatgcggtattagcagccatttctagctgttatccccctgtgtaaggcaggttgcccacgcgttactcacccgtccgccactcagtcaatacaaagttctgatcttagcaagctaatctcttcacacagtactgcttcgttcgacttgcatgtgttaagcacgccgccagcgttcatcctgagccaggatcaaactctcgttaaaagtgtttaatcgcggtcaggattaactactagctaatcctatcccgttattactgtttttaggttgacatcttttttgatgtccgttctgaatttttctctatttaagaaattttcagggttgttgtctattgtttaattatcaaggttcttgattgcctgtcccgtttgggtcagcccaaacataatatcatttatcttgtgtttatgtcaagtaattttttaagattttttcgagttatttttactcttttttctttcttactatatctatgatttttccaaatcaaaaacacaagaatatgtgaacggcaacctaacggagaaggagggatttgaaccctcgcgccgctattaacgacctactccctttccaggggagccccttcggccagcttgggtacttctccaaaagtgtccgtaaaataatatacacgaatttcttattcttgtccagtattttttctctttttttcaaattttctgcacatctttgcaaaatgcctgttattccgcaaaaagcagcattgactgcccgccttcacggaagtcaatgctgcctttttcagtttatgaagctgcactctgaacttactcagtctctatcttattaaacgccgggaacgccgcgccagaacgatacacaaagcagagccggccagcagcagcatacacgccgccgcgtctgtgttgtctcccgtctttgcgtgggacgcttctgatcccttcccgctgcccgctccaccggtatgaggtaccgcctggtcagattccgacaggtgggtgaggacttctaccttgataacttgaccattttcctctatacggaacggaaatgttccgcccgggattttgtaccccgcaggcgcctccactatcttataataatactctccgtacttcaaatcatctgttgtgatcttgccagtgctgtccgtgaccttctctgcaataagagtcccatctttatcatagatttctaccttcactccccctgcgggctttgcgtatttactgtcatcccgtacggtcagttcaagcgtgccttttatctgtgtattatatgcctcataagtaaatgtactgttttttcctatatcagcgctgtgctccgtcttgtctaggacatacccttcgggcgccgtcacttctttgatgctgtaacttcccgttctgatctgctgcagatcagattccccattgatatccgtaggtctcatcgtataagtaacataatcgttatatacggcaaacactgcgtcctttagaactgtcactttgtcgtccgcgtatttttttaccgcgatatttccttttggaatgctgctgcttccccccgcaatacttcccgcaattttcaaatgcgtgcctgaatgttcctggtccgcctccgagccttcataatatacctgattgacaacctccttattcctggcgtcgtcaccaaaatctgtgcggaacacaagcagatacgcccggtcgatcggtttcaggaaatgaaacctgaaaacattgtctgtcagatcatatgtaatattctctctcgtcacagccacttcattcccccggctgacagaaccgtccggctgtacatcagcttcatagagttttacagacgacgggtcaagctcaagctttggatccgttgacagcgggtctgcgatgacaggcttattcagctgcgtcttgttgctgtttactgtcacggaccactccagatagtttactccggcaagatctttctttacctcaccctttttagaaagtacagagcccgtcacctctttttccgctttgctgctgatcggcgcgggcagttcgtcgccatacagcacggccagattgctgaatttttttgtggcatttgccgtcagaaacccgctgtctgttattttagtcctgaacgccaccgtgtactgcttatccacataagccggcagaccgatccgcaatgtttttgacaccctgtcgtaagactccgacacctgctgtcccgccggtgccataaggctcagacttcccgtcacatactccaggccgtccggaatcacatcctctatataagcattgtgaaacggcatttcattctgattgcacgtaagctgccattcgatctcccctgccgcgctgttataggaaccggctgtctttgcaaacatctcacttaggatctcaggatcggacgagaccggatattcatgtccgccgattttaatgactgcctcattgtgaaacggtttgctcttatagccgttgaccgcccagatatttgcgtcatccaccgtcgtacgaaactgaaattctactgcctctgatatactctttgttatctcacccgtaagcctgcggctgtctttatcgtaccggaatgtaatacccgaaccggtcccctttgtaacatgaatgtcatctgccggcgcaaaatcactgccctttgtcacgagagtaagtccgtcgggaatgatatcttctacctgaatgggatctgcaagagcactttcatattggttcagcgtgatcgtccatgtgatggtatggtcctttctgctgtaactgcctgtttttgctataagtgcattgtttaccttcacggaagcgtcttttgatattgatatggccggatccggtcccggacctccggtaaattcaacatgattcttgaatgtctctgtcttattttcgtcatagtattcatctgcgatcgtcgttgtataatgaatcgtatatttctcatttatggtgccgggcacgaccgctatgttctgacccgtaactgtgacagcgccgggaaatgatgcggtcacgtctgtcccgtccttatcacggatcgtgatcccgccggcaccgccttttatcgtaagcccggccggtatcgtatccgttatccgggcgttttcaatgcccagatcattgctgttgaccgtgaccgaccagtttatctcccggacgccggccccggcaagtacccccttcttatcgagtatgcctccgttgatcgtcgtatcggcagtcactgctgctgtcaccgccttttttgtctccttattctccacactgttcccgtcatcatcctttttatatggctcttcgataaactcataagccgcctcggctttgtttgtaaactttacagcatcttttcctccgccaaatatgcccaattcaaaagacgtctttaatgttagtgtataagcttctcccataccggcagaaaagccgtccgggaacgtataagtaatgagcccgccggtgctcttttcgatcgtaccgccggtaaccggcgtattggccgcacttacacagctgtaagaatctggatctgtctcgtcgaagtccagtccctccggaagggtatcttttatcacaaggcccgtgaccgtcaggtcagccggagttgtgttctccactttaagtgttatcttccacggtatcgtaagctctccaaggttgggaattccggcctgctttgtcagggacacgtcagcggtctgtttgtcaatggcaaaatctactgttatcttgtccgagccatcggccagtccaaggtcaaagtctatctcctgtttcccctcatttggaatctcatcctcagaaagtgttccacccatccatatatcgccctccacgccttcctgtacagcgtctgtatcggaaaacacaagccggactatgttggtattctgcgcggtatcataaccgaccgtgccctgcgctacctgtttatcccccatatttacgggaaataccgtgccgtcctccatatggatttcttttgggatcgaaaaagtatattctttcccggtctcatatcctcctgccggaatctcatagtgatagacgagataaacttccgttccccgctctacattttttagcgctgcaatatcgtttccatccttatccacagcctttaccccggtaaaaaatcccgtctggacggattcagccggtccgtcggcatgcagtgttgtactgcccgccagactaaccagtacggcaagcagacatatacatatgattctcccctttttccacatatatttacgctcctcttttatattgtatataagttatatttaatacaaccgggaacgcgcgtctatatactcaacttttttggtactgtttttacggaaatatacaagatattgtgctgttgcactgcaggtaaaatatcacagcacaaaaaaaccggaaactccattacggaattcccggcattgctttccagagcggagagggtgggattcgaacccacgcgccctctcggacaaacggttttcaagaccgcctcgttatgaccacttcgatacctctccacatattcaatttggccgcgctttctcagcgacaatatgcattttatcatacatatattttatcgtcaatatataaatctgaagattttcaaatttttccattcaagaaggcatgcgcaacctccatgtcttccggtgtcgtgatcttgatattcctgtatgatccttccacaagcttcaccggcacatgcatatacctctctaccgccatggcgtcatctgttatcccttcacagtcttcccccatcatcatagaatatgcatccattatcaaagaattttcaaatacctgaggcgtctgcactgtccatacatactttctctccggtgtcttcaccgcgtaattgtcatcgtccacgagtttcaccgtatccttgctcggcatcccggccacacacgctctgtatctcacaaccgcttcatactgcctgcgcagcatctcctcatcggcaaatggccttgcgctgtcatgtataaagacataaccgtccttcacttttccgtcatctgcgcacacagccgccttcagtccctcatagacagaatcatagcgttcctttccgccctccacgacagcagaaaccttcgtaaaaccatatgccctgacgatctgttcgcggacatacgtcacctgtccgccgccaacaacgagcgccacatcgtcgatgacagaagactcttcaaatgtctttaaagcataatagacgagaggtcttccctccagtttaagatactgcttctggacagacgtccccatacgtgttccctgccccgccgccagcacaacagccgtacaccttttcttttccttcatacgctcacattcctctgactgtactaaaatttatctttccccaagttttagattcggaaccgcgttcagatcccagccatgtctcgtaccgttcctgtactcataatacgccgccgctccgatcatggccgcattgtcggtacagtagaccggcgacggatagtaaagtttgatcccttccgcctcacaggcttttgccatggccgctctcagcgcggtgttggaagcaacgccgcccgctatggcgaacttatccatgttgtattcctttgccgcgcgcatcgcattctccacaagcacatctgtgaccgccttttgaaaagaggccgccacatccgcctggctgtatgtctcccccttcatccggcatccattgatgtaattcagcaccgccgacttaagtccactgaagctgaaatcatagggggcatcctccatatgcgcccttggaaacgcgaccgcatcaggatctccttcttttgctacccggtcgatcttcggccctcccggatacccaagaccgatagcccgcgcgaccttatcgaaggcttccccggccgcatcgtctcgtgtacgcccgataatgtcaaattttccgtaatcctttactctcacaagatgtgtgtgtccccctgacacgacgagagaaaagaacggaggcttaagttctttatgttcaataaaattagccgcgatatgtccctcaatatgatgaattcccacgagcggcttcttcgccgcgtaggcgatcgctttcgcctccgccacccctacgaggagcgcgcctacaagtcccggtccgtacgtcactgcgacggcatctatctgctccagggctgttccggcttcccggagcgcttcttcgatcacctgattgatcttctctatatgctttctggacgcgatctcaggcacaacgccgccgtacagtgtgtggaggtcgatctgtgaggaaatgacattagacagcacatcccgcccatttttcactacggctgccgctgtctcatcacacgaactttctattgcaagaattaatatgtctttctcttcactcataatatctcctctgcctatgaaaatgtcagttcagccgtccgcttatccttggctgccaccgcattcgggaatatggcgcgcacatcatccatgtactcctccggacgtgtaagcgacgggctgtagtgggtgagccacatttctttcacctctgcctctttcgcaagccgggccgcctcgtaaaacgtcatatgcttatattctttcgcctttttaagcttatccttctcaccgtacatcccctcgcatatgaacagatcggaaccggctgcattttctgcaatggattccgtcggcctcgtgtcagtacagtaagtcagcttgattccctttctcggaggtccgagcaccatgtcgggtgtgtagaccgtgccgttatcctccacattttctccattctgcagtataccccagtatctctgcggaatacctgcggcgccggctctgtccacatcgaacttgcctgctctgtcaacctccagcgtatatccgtaacataggacattatggtttacccggaacgccttcagacggtagccgttcatctcaaatgtctgttccggctccgtgatctcaatatatttgacaggaaacggcagttcaggcgcgatcaccctgagtgcattaactactctttcaagtcccttcgggccaatgagcgtcagcggctccgtccggtccgcgttgcccatcgtcagaagcaggcccggaagaccgctgatatggtctccgtgataatgcgtaaagcagataacatcaataggcttaaagctccagcccttctccttgatcgcgatctgcgtgccttccccgcagtcgatcagcacactgctgccgttatatctcaccataagcgctgtcagccaccggtaaggcagcggcatcatgccgccggttcccaacaaacatacatctaacataacatacccctattctaaatcttgattttaaatcctttcacaaaatcatcataacagtcttcacagaggtcaaaacaatccacctgattgtctttattggactgatatccccatcgtttttccacttcaagataatcctcctgggggacccctttggaaatgatgatctcttttccacatttattgcaaataattttttgtaaatcttttgtttcttttatctgaacatcatactggcgcatacaattcctcctgtgtgtacatcacttcgacttctctttgctacgcctacattataacggactgccgccgctgttcctagtgggaactgctgttaaaactgtcaattacctgccaagcccgcggctcatgagcaccgcgtcctccgccggatcagcgtagtaccccttgcgcacgccgtcttcttcaaaaccgtgatctttataaaaagcgatggccgcctcgttgctctcccgcacttccagcagcagctttgtaattcctttttcctcgcagaagttctcaagcgcaagcagcatatgcccggcagccccttctctcctgctgccttctctcacggcgatccttgcgatctcgccttcatccagcacataatatacaatgagataaccgatcagcctgtcgtcgtcaaaggccccgaacaataccgaattattctgcccgtatgtgtcacagagcgcttcataactccagctgtcgggaaatatttcccgttccagaccggctatcttttcaatatcctgttccccgatctgccgtactgtaaccatgtagaccgcctcctatcctacagattctgtatatcctcgatcagctgcaggaccgcttcttctttcgtagcccagcttgtacagaaccggaccgccgtatgctctttgtcaacagcctcccagaagctgaaagaatagtcctttgccagcttttccatatgatcgttcggaaggaccgggaactgctggtttgtataggaatcgtaccgcaggccgtatcctttctcctgaaatgctttcttcagacgcatggcaagactgtccgcatgctccgccaccctgtaatacagatcgtctgtaaagagcgtgtcaaactgaatgccgagcagtctccctttcgcaagcattccgccgttatgcttgatcatatagcggaaatccttcttaagcgccggatcgacaataacgactgcctccccgaacaaagctcccacttttgtacctcctatataaaatacatctgtcagtgacgctatgtccctgagcgtcagcgtagatgcctcagacgcgattccatacccgagacgggcgccgtccagaaaaagcggcagatcccgctccctgcatgtctcatataattctttcagttcctctttgctgtacagcgtcccgttctctgtcggatgggaaatgtacaccatgcccggctgcaccatgtgctcgtgggtcacatcgtcccagtgctcttcatacatccggcgtacctgggccgctgtgatctttccgtcctcacttggaagcgtcaggactttatggccggtaccttccaccgcccctgtctcgtgcacgttgatatgtccgctctctgccgcgatcacaccctggaacgggcggaggatcgaactgatgaccgtaaagttagcctgagtgcccccgacgagaaaatgtacgtccgccgtctcacagccgcaggcttttctgatcttctctctggcgctctcacagtagcagtccacaccgtatccgggtgtctgcacataatttgtctcttccattttcttcaagatctccggatgggcaccttccgtatagtcacattcaaaaataatcatgattccttcaacctctctttcctctcccgttccgcctgggacactctgagataatccgggcggtgttcagccgcagtctcacttctgccttccagcagatacttcataccgagcgctccgacggaggccgctctctgccggttcatatgcgccggcgcataataatgctcaacagtcagcttctcttccagcatttctttgtacacaggcaccccgtcgcccaaaaacgtgaccttttcaccggcggcattgagccgggcggccagttcttcaaccgcggcggccatctggtcttccaccacttcaaacgtatgctccgccctgtaaaggcccgtatacacctggttccttctcgcatccatgatcggacatatgatccccgccgtcccgtacagattgtacgccagcccctccagcgtcggtacatgtatgagcggcttatgaagcgccagccccagtcccttcgctgtggccgaaccgatccgcagtccggtaaaggatcccggcccgcccgccactgcgatggcatcgatcgtatccatgtccagctcgatcattttggccacttcatcgagcatgggcagaagcgtctgagaatgtgtcttcttataattcaccgtatattccgccgccgtctgctcttccccgacaacagcgacgctggcgaccagccccgaactgtccagtgctaatattcgcatatgtcaatcctccgataatcaaatcccttttccggatctttttcaatcctgatctccgtgtaatgttcaggaagaatctcctcgatcagatccgcccattcgatcagagtcactccgtctccatagacataatcctcgtatccgatctcatccatctcttccacacagccgatcctgtagacatcaaaatgatagaagggcagacgcccttcttcatatacctgcacgatcgtaaaagtcggactgctgacaggttccttaatgccaagccctgccgcaagccctttcgtgaaaacggtctttccggtgcccaggtctccgatcaaagtaaagaccttgcccgggcaggctttttctcccatactgcgcccaagttcatatgtgtctttctcgctgtaacttactgatatcattgcattccccttctactgctccggtcctttcccctcttccggttcccgggtctcattctcattcacttctgctttcatcttctccgcttttctcgacggacctgccgccttcatcttcttgccgtccgcccggcggatcctgaccgcaggcgcgggcatatgggcaaatatcatatctacgatatccgtgtatttgtccccgagctgcgcgacgggcagaatgatcgcgcgcttctgcgcatcatacaaaaagatgatctgctttctcgatatagctctcttgaacttgctccatgaagcttttccgctgtcttccgttgtagtcgtcataattccgtcatccatgaactcatatgtcaccgtctcctcaagacgtctggaattctgcatctgcttcaccactttttttcttataaaagcaggaaatactacaaatacgaggatcacaaagagaaagaacacgactgccagcagaaactgcctccgcatgacaaaggcgatcgtcagccccacattcagcattccgagcacaagcgcggcgacacccgcgccgctagtgtaaatatgatagatcataaaatccgccatggattccgcatccagcttaacttctactttcacagacatcttttgtaccccctgtccttttgaaacagtataacacatctttttttcttctgccactaatgatatacttatttgcatatcaatgaatcaaaggaggatcactatatgaagtttacattttatcacaataacatcaatgtcctgaaccttgagaaatctgttgatttctataaaaatgcgctcggacttacggtaacgcgggaaaaaaaggcggaggacggcagcttcaggctcgtatttatgggagataacacaacaccccacctgctggagctcacgtggctgcgcgacatggaccgcccttataacctgggcgacaacgaatcacacctcgcattccgtgtggacgactttgacaaggcgctggcgcaccataaagaaatgaactgcgtatgctttgaaaacacagagatgggtatatattttatagaggaccccgacggttactggatcgagatctgtccgtgcggagaataatatcatattgtccgttttattattgacatatgtcaataatcatcgtaatataatgataacaccccttccgcatgataagcggttgggcggcgaaaggagtatccaatggcacgaccaggcaaatcccgccatgtcggcagcataccccgctgccttcactttacggcatcgggaagtccaagaaacggcatcaatctgtccgtggaagagtttgaaacgatccgcctcatggactacagcggcatgacacaggcacagtgcgcggtgcagatgcacgtaagccgggctaccgtacagtctctctacacacaggcacgcaaaaagctggcgcgctttctcgtcgaggggacatatctcgatatcagcggcggcgattataccgtctgcgcggacaaccgggacggatattcctgcagccggcataggaaaataaacgatgataaaggagctgatattatgaagattgcagtgacatacgaagacggacagatatttcagcattttggccacacaaaacagtttaagatctacgaagcagaagacggcaggatcatctcttctgaagtaaagagcacagacggtcagggacatggggcgctcgccgccctcctgtctgatctaagcgtagacgtgcttatctgcggagggatcggcggcggcgcgagaaacgcgctgtccgaggcaggcattgacctgtacccgggggccgtcggagaggcagacgcgcaggcagcgtcattccttgcaggtacactgtcctatgacccggatacgatgtgcagtcaccatcacggtgaagaagggcacaagtgcggcagccatggctgcaaagaacacgggaaccactgaatatcagccggaccagcataacagaacaatgcacatggaaaaggaacaccggcagaaaggtgttccttttctctcatcccacactttaagtttacatatctggacagcaaaagcgaggaatgatcatatgatttccgatatgcttgactgcaggaggtaagacaatggaatggttggaaaatctaagcaaggccatagaatatatagaagatcatctggataaaaaaatctcttacgacgacgcagcccgtatcgcttgctgctccacctattattttcagcggatgttctcatacgttgcaggcatacccctgtctgactatataagacggcgcagaatgacacaggccgcctttgaactgcagcggacgaaacagaaggtactggatgtggccctgaagtacggttacgcttctcccacatcctttaacagagcgtttcagaatgtgcacggaatcactcccgctgccgccaaaaatacaggcgccgccttaaacgcttatcctgcgatcagattctcagttaaggtgaccggaaggagtgctatgacttatcacattgaagaaaaagacgcaatgcgcatcgtcggtatccgtacgccgctgacagaaaacatggaagaaaatcagaaaaatattcctctgttctgggaagacattttaagccggcacactttcgatagactgtgcagcctgtcggacagagagcccccaaaaatactgggcgtcagcgtgtacgaaaatccccgggatatctactactatatcgccgttcccaccggcctcgacacccctcgcgggatgtacgggttcgatattcccgcctccacatgggtcgtttttgaaaacgacggacctctaaaggaaaatgtacagaatatatttcagcgcttctatacagaatggcttcccttttccggctatgactatgcaggccttccggatatagaggtataccctttctatgacggcagaccgcagaacggccattccgaagtatggatcgccattcgcaaaagagaggactgacaatggatatgattcaatgcacggcaaactatacaggctgcggcttacatattcatctttaagatcggactgatcttcttataaatgagcagtacgatcatggaaacgagcacgcctttcagaagattgaacggcgccactgcaaacagtacaaaagtgaacagatccgtgatacttttgttgatggcgctgcccattcccacaagggcatctatcggcatctcaaacgcctttgcatacgccggcagcagaataaaagcgttcagaaaacagcctgccgctgtcatgatcactgttccggacaccattccggcaaccgctcctgtcctcgtacgtttccttctgtagatcagtcctgccggaatcacgagcgcgcagccgataagaaagttcgcagcctcccccactccggcggtgatcgttccgtttatcgcaaagttcagcatgatcttgataaattcaacagccgctcccgcaagcggtcccatggcaaagcaccctatgagtaccggcacctcgctgaagtcgatctgataaaatgccggcgcaaaaggaagcggtatctcaaaaagcatcaaaacggtcgctatcgccccgagcataccgacctgggctattgttctcacctttgttcttgtctttgtccttgcatttacattattcattacatctgtactcattttctttctctccttttcgtttattaaattctgttacaaagaaagaaaatcttcatggaactatggcggcagcaacagaggatgcatgttcccgtgaaaacaaaaaaaccacggctaaaccggggtccttactacattcaacagtcactgctgcacatttcttcatctcatccagactttactgtcggttttggaatcgcaccaaatcagccgtgccatcgctggcgcgggtcgcggactttaccgccggttgggaattgcacccgacccctgaagaatttctattcaattcgagaatattatactccatcgctctgtattatacaagtcttttcaaaaataataagtatccggtatatgatacgatgttcacaccgcgtttcatctttgttttgtcatatgtcttgtcacttgacttgacatatatttctttttgtgtaatagtatgttttgaatctgcccggaaccgtcgcagccgggtacataagaaggagcggactatgactactttagaacgaatcagacaattaaaaaaagaaaaaaacgctgtcatccttgcgcactattacgtcaacgatgatgtacaggaggctgccgatcatacaggcgactcctattacctgagcaaagccgccgcctctgcggatgcagacgtcatcgtgttctgcggtgtctctttcatgggggagagcgccaagatacttaatccggacaagacagttctcatgccggatgccgcggccgactgtccgatggcccacatggcggacattgaaaagatccagaaatgcagggaagagtacgacgacctggccgttgtctgctatatcaactccaccgccctgctcaagacatattccgacgtatgcgtcacttccgccaatgcgatggatgtcgtgagcgctctgccgaataaacatatctattttataccggacgccaaccttggacggtttatcgccgccggtctgccggacaaacatttcatctttaacgacggctactgtcatgtacataaggatatcactgccgcccacatccgcaaggcaaaggaggcgcatccggacgctctcgtcctgatccatcccgagtgcacgccggacgctgtggctctggcagactacgcgggaagcacgaccggcatcatcaaatatgcctccgagagcagctgcgatgagtttatcatctgtaccgagagcggtgtgttcaaggaactgatagacaggaacccccggaagcgcttctatccggcgcacggacaccagtgctgtaccgatatgaagcggatcacccttgaaaaagtcgcttttgcccttgagcatatggagcacgccgttgagcttgacgaagcgacaaggagaaaggcagcccggccgctggaacgcatgctggaactggcgcagtgataaggaagtgtactatgatcgaaccatattatgacgtcgtcatcgtcggcaccggcgcggcagggttatttaccggcctgtccctgccgaaacacctgcgcattctcatgataacaaaagacgacgtggaaaacagtgactcttacctcgcccagggcggcatctgcgtcctcagatccgacgaggattatgacagctactttgaggatacgctgcgggcgggacattatgaaaataacagagaagcggtgcggatcatgatacaggagtctcctgacatcatccgcaggctcatttccttcggtgtggagtttgaacaccgcggagacgaactggcttacacgaaagagggcgcccattccgtatgccgcatcctctatcacaaggacgtcacagggcaggaaataacagggaagctcatctcctgcgccagaaagaggtccaatataacgatcgcgcctcacacggctatggcagaccttattctgcaggagggacgctgcaccggggtcattgtgcggcaggaaggcaaagccataactacggtgtcttccaaagccgtctttctcgcaaccggcggactcggcgggctctttgccaattccaccaatttccgccatataaccggggacagcctggcgctcgcgctgaggcacaacatcgaactggagaacatccactatatacagatccatcctacgacgctttattcccacagggaaggacgccgttttctgatctcagagtctgtgaggggagaaggggccgttctcctgaatcccgcggggcagcgctttgtagacgaactgaagccaagagacgtggtgacggaggccatccgccgggagatggacaagtttcattctccttatgtatatttatcactggcacatatgccgaaagaacagatcatacaccgcttcccgaatatatatgaacgctgccttgaagaagggtacgacctgtcgaaggacaggatccccatcacgccggcacagcattatctcatgggcgggatccgtacagattccttcgcgcgcacgtcctgcggtcatctgttcgccgtcggcgaggcggggtgcaacggggtacacggagccaaccgcctggcgagcaattcactgcttgaaagtctcgtcttcgccagacgcggcgccgcatatctcgcctcctgcatcgacagtataccccatcctcccgctccggtctttaccggccttaccgcctatgcagatcctgaggcgcgccgcagggaggacagggaactgatattgaacgaaatcaaaagaagggatgaacaattttatgataaatggtgtaacgatgaaaattaatatagacgaatacattttaaatgccttgaaagaagacataacgagtgaagatgtgaccacaaacgcggtgatgcccgccgcctgtcccggcagggccgaactcatctgtaaagaagacggcctgatatgcggtctccccgttttcagacgtgtgtttgaactcttagatgagaccgccctgttcgagacggaatgtaaagacggggaccgggttaaaaaaggacagatcataggaatcgtcaccggtgatataagggccatcctctccggcgagcgcactgccctcaattatctgcagcgcatgagcggaatcgccacattcacaaaccggctggcaagagaactggaaggctcgggcacaaaactgctggatacgagaaaaacaacaccgaataaccgggcttttgaaaaatacgcagtcaaggtaggcggcggatgtaaccacagatataatctttccgacgggatactgatcaaagacaatcatatcggagccgcgggcggcgtggccaaagcggtccgtatggcaaaagaatacgcgcccttcgtgcgcaagatcgaagtggaagtagagaacctcattatgctcaaggaggcactggacgcaggcgccgacatcatcatgctggacaacatggataacgagacgatgaaacaggcagtggcagccgccgcaggccgcgcagagaccgagtgttccggcaatgtgacgctggacaggctgaaggagatccgggagatcggtgtagattatgtctcctccggagctttgacccactctgcccctatcatggatatctcgctgaagaatttgactccggttcgggaataggaggcccatcacatgacaggaaaggaaagacgggaaaatatattagatatgctttcagaccgcacgcctgtgaccggcagccggctcgcctcacacttcggagtgagccggcaggtcatcgtacaggacatcgcgctgctgcgcgccgcgaaccatacgatcatcgccaccacaaacggatatctcagattagaacagaattgacgcacaggaatggcgcggtctaacggtcttctccatggtagctcacacgctccatggtgaagccgcggcctttcacctcttttatctgtgtgatcgtcgtaaatgccttgtcgtcgatcctgctgaccgtatcattcaccgcataaagcttccggtgggggatgacacagagcacgcctttttgctgctctttcccgtacccggtctcaatatggaccatcgtagcgcctacattcatatccttgagtattctctgcctgatctcctcatgcttttccgatatgataaaaagctgtatctgtgtctgtccgaaaagcactaccctgttcatgaccatcgtcatcagcataagagccagaacaccgtacagtacctgctccgaatccgaaaagaatatctgcgctccgagcacggtaaaatctacaatatacatgaacaccgccaccggaccgtgcagaaacttgttcagcacaagcgccaggatatccgtgcctcccgtggacgctccctgccgtacgacaagcccgatcccaaggccgagaagcagccctccatagacagttgcaagcagtatattatccgtcagactgtccacaccaggtatctttcttgcgatctccagaaacaccggatacacgaacgtgctgatgatcgtcgtgagcgcgaactttctgccgagcatacacgcgccaagtacaaacaatatggcatttacgataaagatcacgaccgacaggtttaacggcacatagtgggttaccgcaaggccgataccggtcgccccgcccatgatgatcccatgaggcacaacaaacgccgccacggccagtgccaggatcgcgttgcctgccagcaccccaagtacaattttcatatttttcttcattttcatttcccccaatgacactttcctgagcctctttaagatatacccttcatcgtcagctggatccgcttcttcttaaggtctacgctcattactttcacatccacaatatctccgacactgactgcttccagcggatgcttgataaacttcttatccgtgatctcagagatatggacaagaccgtcctgatgtactccgatatcgacaaacacgccgaaatcgatcacattgcgcaccgtgcccttaaggaccatcccttccgtcagatccttcatctccagcacgtccgtccgcagaataggccttggcatctcatcccgcgggtcccgtccgggcttttcaagctcttttacgatatccctgagtgtgatctcgccgacgccgagctccccggccagtttcccgtaatccttgatcgtaaatgacaggccggtaagcttgccgcctctgatgtcctctgtggagaatccctgcttcttgagcagcttttctgccgcctcgtatgattccggatgtacactcgtgccgtccagcggattatccccattttgaatccgcataaatcctgcacactgctcatatgctttcgggccaagcttggccaccttaagcagctgggtgcggcttgtaaactttccgttctcttcccggtaggtgacaatattcctggcgatcgtccccgtaattcccgagatataggacagcagcggggccgatgctgtattcaggtccactcctaccttattcacacagccttctaccacgccggagagcgtctcgctcagtttcttctgattcatgtcgtgctgatactgtccgacgccgatggatttcggatctatcttaacgagttccgcaagcggatcctgaagcctcctcgcgatggaagtggcgctgcgctgccctacgtcaaacttcgggaactcctccgatgccagcttgctggcggaatagacagacgcgccggcctcgttcacaatgacatactgtaccttttccggtatctctttcaaaagctccacgatgacctgctccgattctctcgatgccgtcccattgccgagcgatatgagcgatatgttatatttcttgatgatcttcttgagcagatccttggccgcctgtatcttctgcggtgttgtcggcgcggtcggatagatgaccgtcgtaccgatcaccttgccggtcgggtccaccacagccagcttgcagcctgtgcggaacgccgggtcccagccgagcacggtccggcccacgatcggaggctgcatgagaagctgctccagattcttcccgaacacctggatggctccgtcttccgcccgctctgtcagatcattcctgatctcacgttcgatcgcaggtgcgatcagcctccggtaactgtcctccaccgtctctttgatcaccggagctgtatacgggttgtccgaaacgatcgtcttcttttcaagataacggatgatctcttcctccggggcctcaaccttgaccgtcaggaacttttccttctccccgcggttgagcgccagcacacgatgtcctgccagtctgccgacggactcctcaaaatcataatacatctcatatacagattctgccttttcatcctttgccgcagatacgatacgtcccttctggaacgtaagcttccgtatccatatacggtagtctgcctcgtcggatatgcgctcggctatgatatctttcgcgccgtctatcgcttccttcaccgtgccggcgcccttttccacatccacgtacagcgctgcctctttctccagcggacctttcagcttctgaagcataataaggtcagccagcggctccagtcccttctctttggcgatcgtcgcccgtgttctcctttttggacggtatgggcggtacagatcctctacgacgacgagtgtctccgcagccagtatctgcctccttaactcttccgtcagctttccctgttcctcgatgcttgaaagtacctgttctttcttttcctccagactgcgcagataagtgagccgttcaaaaagccggcggagctgctcgtcatccagcgttccggtcacttcctttctgtatctggcgataaacggaatcgtgttgccttcatcgatcagcttgaccgcagcatccacctgccatctcttgacgcccaactcttctgttattttctgattaatatccattcactgtattcccctttatcttaaataaacgctatgctatattgtaatcgaaaagaatgcgcatttcaacccgcacctgtgctttatttgcaatacagagttcactctgtttcattgtaaaaacaggactcttatgctatacttggagcaggacatacatatattctaagaagggattattctacaccatgaatgagataaatgaaacacaggagctgtccaaacagcagctcaaatcgaaggaaacaaaggcccgcatattctgcgccgcaaagtcgatcctgaaaaaacagggctatgaagctctctccatcaagaacatatgtgaggaggccggcgtctcgaacggcagcttttatcatcacttcaagacaaaagatgatctgctctcctattatatcgaagaacagccgagcatcaaccctgattaccttgatctcccggccagcacggctgaagcgaagaccaccatcgtccatgtatatctgaactatgtgacttactgccgggaactgggcgtggaatttatggctaattattatacaccaaaaaaccagtctttaaaccctttgatccgcacggaacgcccctatccgatcgtgacggtacgcaactatctggacaaggcggtccgggcgggggtcgtcacgccccgtctcagtctggatgagatcaccaccgatatccggatgatcgtgatcggcaatgtatttgaatggtgccttaaaaacggcagcgcagattttgagggcaatatgcgccgctcactggaaacctatctggacggagccctgtaaacttacccaatacttcaggaggctgctatgtataccttcatcgttaacccgaacgcccgctccgggctgggacacagagtctgggcagagatcgaacgttccttaaaagaacgcggcacagattaccaagtatattttacgaaataccagcgccacgcttccgccatcgcaggagagctgaccagcgacttgaaagcacatacgctcatcgtactcggcggagacggcacggtcaacgaagtcatgaacgggatcgccgatctgagtctggtgaccttcggttatattccgatcggctcgagcaacgactttgcccgcggtcttggactgtccacggatgctctgaccgcgctttcgcatattctgacgccgtccaaatatacatatattaatgtagggaccatgtcctaccaggagaaaaagcgccgctttgccgtgagcgccggcatcggattcgacgccggtgtctgccatcaggtcgtggtctcccggctgaaagtgctcttaaacaaaataggactcggcaagctgtcctacgcaggagtcgcgctgagtctcatgatgtctctgaagccgcggaaaatgaccgtcacgctcgatgacagccggaagatggaatttgaatctgtctattttgccgctgccatgaatcagcgttacgaaggcggaggctttaagttctgccccgccgcagacccgtcggacgatatcctcgatgtcatcgtgatcgccaatatgcccaagctgaaagcgctcgctcttcttcccactgcatttggcggccgccacgtccgcttcagggggatccacatcttcacatgcagaaaagtggattttgtgagtgagaccgcgcttcccgtccacacagacggagaacctatctttcttcaaagacatatgtccgcttcactggagccgcagaaagtgagggtcatcttatcttaaatcatagaaaaggacgctgccgccatgtatctcatacttgtaatattcatcttcatcgtcatactctatctttatctcgtctggccgcgcacctccgccagagagcagatggagcgttttgaacacaccctttttgcgcaccgcggatatcactgtgcggcgcggggcataccggaaaactccatgccggccttccgtgctgccgtgaaaaaaggatatgggatcgaactggatgtgcatctgacccgcgacggaaagctggctgtcttccacgacgacgacttgatgcgcgtctgcaaaagcagtgaatctgtggaaaatctcacatataaagaactgggcagataccacctgctggacacgaaggaacatattccccttttcacggatgtgctctcccttgtaaacggacaggtaccgctgctcatagagatgaagatcccttcgtcgtccaccgccatctgctctgccttatacgacgcgcttaagaattataagggtccctttctcgtccagtccttcaacacgatgggtatacggtggttccgccttcatgcgccaaaagtgctgcggggacagttgtcggacaatctgaccaaaaagaaaagcaaggaaccgtgggtgctgcggttcatggtccgccaccttctcaccaacgctctcggccgtcccgactttatctcctacaagctggcagacctcccggctttcagtgtgttcgtcctgcgcgccctggcacatacccctgtcgccgtctggacgctgcgcacggaagccgcgctcgaggagggcatacgctgctacgacatgcagatatttgaaaaacagaatgaaaattattaacaaataatgaacattgttgttgattcttttttttcatgttataatccgtgttgaaccaagaatatattttattggctgaaaaagtaaaaggggtaataagaatgaaagcctgggataaggtaaagtattttattaaaaaatacaggcacgcatgggtatttttgtacgcgtttatttatatgccgtggtttatatacctggaaaatcatgtgaccagtcatttttatgtgatacattctccgctggacgactacattccttttgtggaatactttattgttccctatgtgctctggtttttctttatcgcactggcgatcggttattttttctttaccgaccgaaagggattttaccagcttacagcgtttttatttacaggaatgaccatttttctcatcatatgtacactgttcccgaatggcctgaatctcaggccggtcgttttcgagagagacaacgtctttgtacatatggtgcagagactctatacgacggatactcccaccaacgttctgccgagtatccacgtgtttaactccatcggagttaccattgccgtatcacacagcagcgcgctcaagaaacacaaaacagtacagtacgctgcttatatcatggcatttttaattattttatctaccatgttcctgaaacagcactccgtgactgatgtgatcgcggccgcagcgatggcatgcgtcatctatccgctcgtgtatgtgacccaggagaaaaaagcgccgaagctttcccatcagcctgtctgaacggacggcttaacacaataaaaaggagaagattattatgtatgcagaattcagtgaaaacctggtaacaggaaatgaaatgatcgacactcagcacaaagaattgatcgaaagaatgaacggactgctcgaaagctgcgagagcggcaacgagaaactgacagccatcaagacgcttgattatctgtcagactatacggactaccatttcaaagcggaagaacagctccagcaggatatagagtatccgggatatgagaaacacaaggcacagcatgaaatatttaagcagacgatcaatgaactccaggagatgcttcaggaagaggaaggtccgtcaaaggccttcgtagaaaaagtagaagaaaacattgtaaaatggttctacgtgcatatcgaaggatttgaccgctctgtagcagagtataagttcatgcgcggaaacaacgaaagactctaacagcatacaaacgggaatgttccgtataaaaacagactgcgtacaccgcagtctgttttattgccttattcggccctgtatttgtcctgtccgagccgtatattgatatatgccgtatattgttcaaatgccgccggcacaggatacttctcctgcacctcatccggatgcacgaacagaaaatcttccgtgcaggaattttccagttcatccacgcgtatgagataccccgtcatatgccactccacatggctgaaaatatgtttcgcctccccgagactcctgatatggagcggggagagtccgatctccctgctgtagttcagcgcatccgcttccgtgagctttccctctacgttggggaactcatacattccggcaagcagccccctgcccggccgttttctcaccgccgcattctccccgtcccggaagataaacaccgtccgctcttcgacgcggcgggctttctgctttttcttcaccggaagttctttctctatgccaagcttccgggctctgcagagactccgggccgggcattccatacacttcggttccccattcggcagacatacgatggcgccgagttcgatcagtccctggtcaaagtcaccggcggcatccgccgggatcacttcttccagcttcctctcaatatccgcgcggacactctgcttcataatgtcttcttcacttgccagaattctggatacgacgcgcagcacatttccgtctacggctggttttggaaggccgaacgcaaatgcactgacagcgcctgccgtataacttccaatgcctttcagtgaaagaatctgttcatatgtgtccggaaacgttccgttgtgatccaccatgatctgctgcgcagccttctgcatgttgcgcactctgttgtagtacccaagcccttcccagagcttcagaagtgtgtcttccccggcctcagccagatgacggaccgtgggaagcgctttcagaaaacgctcataatatggctttacggcttctactctcgtctgctgcagcatgatctccgacacccatacatgatacgcgtcaggctgttctctccacggcaggtcacgcctgttttcccggtaccagctgatgagaggccgggccagttcataaaggagcggttctccgagaatgaccggtacgtttccggctatggcaatacggtccgcttccacgtcacagtcatacgccacaatacggacgccggccctggccgccctgcgcagcgcctcgccaaacgcgcggtgcgtatccatgttcggagtaaaataccgcacgtccttcatctgtatgacaaaaaacacatatgcttcgtacccttccttcacagcctccgtcagctcttccacatgcttgacagccctctcgctcggagcgtccggaaagcgcaccacgccgccctcctccagcgttactccctttacttccactaaaatcttccgctcttctgcttccacatacagatcgatccttgagttccggtacgtatactccgggcgtatgaggcttatgtcctttacaaaatggccttcttccatccattcctttacgatccggttcggtatctgggagtccatattgatcatccgctctccctttttcacactgatcagatcccatcctgttttgcgctcaaggctgtccgacttctgcacgtagacttccgccccgggtgtgagcagttccgcgcagcgtcctgtgttcttgacatggaccgtctccttcttcccgtcgatttctatatgtgcgataaaacggttcgggcgctcctgaaatgttcccttttgtatccgttcgtacttcataagatcactctcctgcttttttctcttcagactgctccgtttagacttacgcactccattctagcacagaccgcgcggtcccgccaatacacaatcatattcttcctgaatttgcatagttatcttctatatgtatatcatcattttctatatataaatcccctgtttgccccgaaacatgccaaaagacatggtataatatgctcataaacgatctgcctgacagagactaaaaaagaaagagaggcttcagccaaatgaatccacagacaccatcctatgaaataaaactgctcagctcacttgcaaaggtcttccccgacgagactcctgtctatcagccggaatgccttctgttaagtacgctcaagggagagaccgtatcctttcaggccgcctgcactgcatccggcacctttttcaagacagcggccgaggtcgtcatccattccccgctcaaacagtgcatccgggtgcgcaatgtactgaatgttcctgtgggacgcgcctgcaatccggagacagacgacaactatcttaggacgacatcaggtatgtaccctgatctgctcagagagttatccgacaataccacgttcatcttccccggtatgtggaggagcctctggctcgatattaaagtgcccgaagagacggcgccgggcgtctaccctgtcgagatctccctcgtaaaagagggagaggtactgtgcagcgccgcggcttctgtcactgtatatgatgtcgctttgccaaagcagaagatcatgcacacggaatggctgcacgccgactgtctcgccgattattaccacgtacccgtattctccgaggagcactgggccatactgaaaaacttcttcctggaatacacggaccggggctgcaatatgatgctgacccccttatttacgcctgcacttgacaccgctttcggcggggacagaacaacggtgcagcttatcggtatcacagtggacgacggaacgtaccggttcgatttcagccgtctgaaacgctgggtagacctctgcctcgaatgcggcatagaatattttgaaatgtgtcatctgttttcacagtggggcgcaaaatatccgccaaagatcatggcggatgtaaacggaaaggaagaaaagatatttggctggcatacgcctgcagtcggggaatacacccggttcctgcacgcctttctgcctgagctgaccgccaggcttaaggagtggggcattgacacggtcacctacttccatctgtcggacgaaccacggccggacgatctggatacataccggcaggccaaagagtctgtggctgacctgctgaaagggtatcacacgtttgacgcattatccagttatgaattctaccgccacgggctcgtcgacaagccgatcccgggaaataacgagatcgatgaattcctggagcacgggctcaccgatatgtggacgtactactgtgtcggccagtatctcgaagtgagcaaccggtttatgtccatgccgtcactgcgcaaccggatctacggacttcagttatacaagtatgatatcatcgggatactgcactggggttacaacttttacaacagccagttctccctggagcacatcaatccttacgagacgacagacgccggaggcggctttcctgccggagaccctttcctcgtctatccgggcgaagacggcaggccggaagaatccatacgtatgatggtccactacgaaggactttgcgacctgcgggcgtgccggctgctggaatctcttacaagcagggagtatgtcatggaactcattgaggaaagcctggcggaaccgctgactttcaaacggtacccgaagtcagatatgtatctcatccagctccgcagcaggatcaacagggagatcgcctcacgatcatcacttcatgccacttaaggtcattcctttgatgaactgcttctgaaacaggataaatatgacgatcataggcatcattatcatcgctgccgcggccattgtggcggacagatccaccgtcctctggctgtcgaagatgacaagcccgagcggcagcgtcattttgtctatgtcgttcagcatgagcagcggattcagataatcattccagtttgccatcgccgtaaagatgccgatggagccgaccgctggttttatattgggcaggatcacactccagtatattctgagcggcccggccccgtccatcttagcggcctcacacagactgtccggcacatccgcgataaactgcctggccagatagatggaaaacgcgctcacgagcgccgggacgatcaaagcccatttcgtattgaacagatgcatcttctgaaccatgagataccttgggatcatcgtcacctgaggagggaccatcatcgtcgcaagaagcaggacaaacagcagcttcttagcgcgaaactgatattttgcaaatataaatccaatgagtgtactcgtgattatgaccgctgccgtaataaatatcgtgataaatatgctgttcacaaaccaatgcccgatgggagccttttcaaacgcggtcttatacccttccagcgtccactcctctggaaaaaactttgtcttgttcgtgcggatgtctgcgttcgacttaaacgagatcatcagcatccacgccatcggatacatcatggccgccgaaaacagtccgagaaacgtaacgatcatataatggtattttttcttcattattcataactccaatctgcccgcatcatcttattctggatcatcgccaccacaaacacgatcacaaacagcccggccgcaatggcggacgcatatcccatgtcaaaactgataaaacttgtcctgtacacgtaattcgtaagtaccatggccgtgttgttcatgcccccttttgaagcgaagatacggaactgcgcaaacatctggaagtaattggccatggtcatgatcgcgacaaacgcaaacgtacgtcccatcagcggcagcttgatcgagagaaaccggcgcaccggacctgcgccgtcaatggcagccgcctcgtcaaattctctcggcactccttctatgccggctgtaaaaagcaccacgttgtaaccgatgtctgcccacagtgtatacacgataataaggagcatgagcggcagcgtagtgagaaaccagtttttgggcgccatgccaaagaatcccgcgatctggttcagaatgcctccgtctgttccgaggatcccgtatttccataccattgacgtacctacaacaggggcgatacacggaatgaacaggatcgtcctgaaaaaggtcttccacctcttccacggaagtaccgatatgatcttagccagaaacaacgttatgatgatgttggcagacactgcagccgcaccgaaaaacaccgtatttttcaccgcctgccagaatacctcatcctgcacaagccgtctgtaattctccagaccaaggaagatattctgcgcacttgcagggttgtagtcaaaaaaagaaattcccaggccataaactaccgggaacgcagtaaatataaataaaaacaggaaacttggcactaatactgccgccacaaaccgattgttcttcatataacggactccttcttcattatcgacgcaaaaagggcagagaatcccagtgggatattctctgccgcccctttcctaatccatggaatagccgatctggcactctttcgtgatcttctcagatgcttctttcaaagcgccttccacatccgggtcattggactggcaaaggtctataaacgtctggttaaatatatctctcatatcagaagtgttgtaaggtcccatccactgtccgctcggaagaatatcaagaaggaatgtgacatttggcatcgcttctttatactcctcgctgtccagaagcgattttctcggcggaagctggttgcaggcgatattgtgctgtaccagattttccggctcgctgaagaacttgacaaattcccatgcggcatctttattcttgccgttttccggcacgatgatgccccaccctgtctcagacgcaaacgccatcttctcgccgtactggggaacctttacatactcaaaatcttccccgtatgtcaggtcatatgagtccgtaccttcgccgatagcccaggagcctaccgacgacatataacctttgtcctgatagacatcattatagcaatattcatctgccgtcagattctcaagatcgcattccccgtccttcaccatgctgaggatctcattcatcgccgctatgccttccggtgtcgcgaagttgacggaatcatcatcctgcaggtactgtcctccctgctgcaggatcattgccagatagttgcagataagcgcatcggtgtctatcatctcaaaccccttcacttcaacgatatctccgttttgctcagacacttcctttgacgtcccgcgaagttcctcccacgtctccggataggcaatgcccgcttcgtcaaacagcttcttatttacgatcattccgccgtattccaggttaaattccatcggaaccccataatacttgccgtccttctgatagatgcccacggtaggctccatataatcctcatccatttcctttgacagatctgccggaacttctgacaaggcgtcagacttgataaaattcggagccatgccgccccacaccgcgatcacatccggcccggatgtgctggaagtgagcgccgtctggatcttgtcattatacacttcgtaaggatactcctgtacctccaccttatactccgaattggcctcctcaaactttttagccatctccttgtacgcttttacccacggttcattgtcgtgacaccagaatgtaagggtcgtcctgccgtcttcttttgaagaagacccgctctttttatcaccgcctgaacagccggccagtaaggacaggcacaaaactacagcaatcgctgccgctgatctctttcgtatcttcataattacctcccataaaataacaaattattactctatcagtatataatcgccatgccataatcacaaattgatatttcacatgtctttattggtgttgtctataaatgacaccgtaccctattccaaggtcctttcccgccagcacatattttttggccctcttctgcaggctggtctcttccgggtacttttctttgtcagccaggacttcgccaaagatacgctcctccgcctggcggtacggataggtcaccttccggatccggaaacgcttctgaaacttcatgatattactttcctcatccagtacgcaggacagattcggagacaacagccatgagtcacagtcgtacatcgtataggacgcgtcaaagaacttgtccgcctgagagaacgaatcgtcgcaggccttctccgacagcggctctccctccggaatatgtacgtgaagcacaccgtcccccgtctcaaactgcagccttccaagccggaagatacgcatctgaagcggcaggctcagccacccttcttccatcagtcctctcacgcctcgtctcttcagacaacaacggtaccagatcgtataatcataaaacgtatcaaaatataccttgtctgttatcccccgttttttaaattgttcatatcgttcagcggcaaaagaaacgtagagatacagcagaagctgctccgtcccctcttcttcgcggctcttgccgagaaaacgctccgtatcgcggtaaaataactccttccaactgatatactctgcccgcggcatatcgtacgtctcaacgatgcgctgagcgtccgcaggaagtttaattccttccattaactcctttttcgtcatgaccgtctcctgtatcctctttcctcgtgattttcatattactttctatcgtatctgcgaccgcttttacatccggtatattacggggatgatcacagatgtatttcggatacgtactgtctttcaggccttccagcagaataatatctgcctccggaaatgcctgtacgatctcatgttccgtgacaccggtacattctttcgtgaccatcattctttcagaagaatatacagctgttccgaaggcgccggccatgcgatgtctgaagctgtctgtgccgggtacgtccggctcaaagtcatgtccgtcatgtttgatcaccgcaaccttataccccctgcttttaagctccggtatgagcttcgtgatcaacgtcgtcttccctgtattcttaaatccgctgaccgcgtatatatacggtctgcctacagcagtattatccatacactgtctcctttacacaatccttcattgcctgccggaatatcgatcaggcagttgcagcccttcatagaactgagcgagccggacgaatgcgatccctccggtacacggaccataccggatgcccacaccgccctgacaaatctcctgctgccgcttttcttagggaacccattttccatgacagcctgctgccgcacaggggcaagcgcgctgtcgcctgtcatatgataaagggcaggccgcacaagaagctccatgccggccgccgccccgaaagggttgccggacaggctgatgatcacggcgccctcatatacggacgccatggcgggggaaccgggcttcagcttcactctccagaacagtctttcggcgccgaggcgttctatgacatcatgcataatatccatcctccccaccgacactcccccggtcgtgatgatcaagtccgcttctttacttatccccgcaaggcagccggccgcctttcctgcgtcgtcttctatccttcccgcatagaacggcgtaatgccccactcccgcagtcttgcctccacgagataccggttggaatcgtagaccgccccgggctttaacggtctgcccggctcctgcagctcactgcctgtcgtgagcactgccacagccggctttttcttcactcttactctctcgtatcccatgccggccgccagcgcaatattcaccgcatccatccgctcgccgtttcggatgacatgggttcctgctctatagtcttccccctgaaagcagatattctcacatggcttgacagaacggtatatctgaaccttctcttctccataatccgtatcttcctgccgtatgaccgcatccgcgccttcaggtatgggagcgccggtcatgattctcaccgcctgtcccggaccgaggctttgtacagcgggaacacctgccggaagttctcctgccacattaagtaccgcagggttttgcgcgcatgcgccccggatgtccccggcgcgtactgcgtaaccgtccagaggtgaccttggaaacggaggctggtccgtccttgccgccagatcttccccgatccgtcttccaagagcttccgacaggctgcactcctttgtcccttctgtctgtttcacgtgagcgttcagtattctctgcgcttcttctaatgtaaccaacctattgaccctccagcctctcataatcctcttttgtattcacattgttcacggttgtatgcccaagcggaagaatctcacagccggcacggcttctttcccaccagccgcacagccggcagtttccttctgccatgagctcctccgctgcaggcagcatccctttactgtacactgcgggaagcggcagaagccggtcccccgccgacgggcagaccggtctccctgttcttctgtatatctccatgaggtccttaagaagccggtccggtaccgggaccatatcacacggcaccacgagaagagcgtcctcctggcacagtttcagccccgtgcagattccgccgatgggaccggtacctttatatatatctttcacaaggaccgcgtccaggccttcatacggcgcatactcctccacagacacatacagcgcgccggcagccttgaggccattttttagccataaataaaactgctttccccggtactttagaaacagtttctttctgccgcccatgcgtgtattttttcctccggccagaatatagccggccagcgtattatccatctctttcctcttccatcgtcacagcccccgtcgggcatgcccgcacacaggcaggttcgcggcccgctttaagccgtgtaagacagccgtcgcatttcacgatcttcccttcaaagtcaaaccggatcacctgcaccggacagacattctcacataccctgcagccggaacagacggcccgattcgcaagtacaagccctgtgtctccgtccgcaaacagcgcgccgcacggacaggcccgtacacaggcgccgcagtgtatgcagcccggacagatgtccttctgaaaactttttgactccgccacgatcctttttatggaacggatgcttatgccttcctctcccggcccatagtgggcatccaggcaggccgtatggcacgcaaagcagccggtacattttttctcgtcaaatcggaatttataactcatgcggctgttcctccattttttctacattacagaaataactcttatatccagggaacccggatattgggtcaaggtaatctttatcaataagttcattggcatcccctctgccgtctccatggtacatgtatacaacacccggatctccgttgatattacaggcagccattcctgtcactgcgccggccggagagcggatgataacagtatccccctctttaagcccgcatttctcagcatccagcggatgcatctcgataagaggggacggctgcagcgcgtccagccacggcacacggtacacccttgaatggaagtactgcggcctgcggcagccggtgttcagaataaagggatatctccccctgtccacggccgtctcctttctgtaatcccgatagacaggcagtccctcatatccgtggctgtccttgtaccgttccagtacaagggactttaattcgatcttgccggaaggcgtacggaacgcttccttctcataatttttaaaggacggcatccgcaaattcctgccctgcatacccccggggctgtctttcaattctttaagcgtcaatccggacggttccagaatatactgcatataattgtcgtatcccttctccagcacttcgtcccgcagtcccatcctctttaatacttccatgatgatctcaatatcattttcagactcacccagaggttcgaccgccttgttggagaaaaagaaacggccgcctttcagacagtggacctcctcccgctcgtaggatgtacatgcgggcagcacgaggtcggccgctttacaggaatctgacataaataattccacatttacataaaaatccagcttcatcaacgcctgctccacatactccggctgcggccacatacggtggttcagtcccataccgaataacgccttgaccggataaggttcttccttcatgatatagtctgcaagccttgtacactgcgcctcatcgcaggacagatcaaaccagacaggaaagtctctctggccgatcgcttcttctttctcataccgtctgaccttcccaaactcattacagggggaagtaattcccgccataggacagttgccgccttctacatcgtaattccctgtgatggccggcagagaaaaaacggcgcggtaattctggacaccattcgtatgatgtacgataggcgaagcggaaaacaaaataccggaaggcccgttctccgcatacattctcgccgctttccggatcagccccgcatccactccggtgatgaccgctgctttttccggtgtataacaacccgcatactcccggtactcctcaaatccatacacatagttgtcaataaacgctttgtcacacagcccttcttctataatgacatgggccatggaaagagccagagcgccgtccgttcccggaacaggctgcagatgaatgtccgcgtcattggccgtgaccgtacgccgggaatccacatcaatgatctttaccccccgttttttcaatccctgatacatgccgctcatggccgtgttggagtggtacagattagagctccacagcagcaccgtacgggcatgcgccagatccggcccgcatatgtgattgccgtagatggagcgccacgccagcgccgccgcctggaaacacgtgctggactccgtacaatagttaggagaaccatatgcattggcgagttttaggagggcagggcggtaccatttcggataaccggtataaaataccgtcgatctggcgccgtatgtatctctcactttcagcagattttccgctatgatatcatacgcctcatcccacgtgatccttgtaaactttccttctcccttttttcgggcgcgcttcatcggatagagaaggcgctccttattataaacgtattgctttgccgccatccccttggcacataatccaccggactggcctttcacattcctgctgccctctacggacacgagcactttgtccttcacatatgcgtctgcctggcagcagggaccgcagataccgcaggctgttttaactatttttgtttctgacatgtttacctctactttctttcagccaccgccaaagttacaaacctgtcccataatatcatgattatatctttcatgtctttgcagcgtcaaattgattataccgatcaaccgcttcacatatagatggtatctatgagccaaaaaatattgaggaacgtgttttaatatgttatattgatactgccgttcactcagaacggcagtaaaggagtacaacaacatgagcattttaactgtagagcatctttcccatggatttggagaccgcgccatctttcacgatgtatctttccgtatgctgaaaggggagcatatcggcctcgtgggcgccaacggggaaggcaaatcaacattttttaatattgtgaccggcgcagtgactccagattccggcaagatagaatgggccagggatgtccgcatcggctatctggaccagcacacagcgctgaataagggaatgaccatacgcgatgttttaaaatccgcattttcatacctctttgcattggaagagcgcatgaatgatatctgcgataaactcggatccgcggatgaagagaccatgaacagcctgatggaggaactcggtgtcatccaggatactcttaccattcacgacttctatgtcatcgacgcaaaagtggacgaagtggcgcgtgcacttggacttctggaaatcggactggacagagacgtcaccgacctgagcggaggacagagaacccgtatcctgctcggcaaacttctgcttcagaaacccgacatcctgcttcttgacgagcctaccaattatctggatgaagaacatatcaactggctgaaacgttatctgaacgaatacgagaatgcctttgtccttatctcccatgatatcccgtttttggatgaagtcgtcaacatcatctatcacgtggagaaccaggagctgaaccggtatgtcggtaattatgaggaattccagaaagtatacacggtaaaaaaagcgcagcttgaggctgcctataaaaggcagcagcaggagatcagtcagttaaaagactttgtagccagaaataaagcccgcgtctccacccgcaatatggccatgtcccggcagaaaaagctggacaagatggatgtcatcgaactggcgtcggaacgtccgaagccggaatttcacttccgtccgggacgcacgcccggcaaatatatctttgaactaaaggattttgtcatcggatacgatgaaccgctgtccgcccctctgactctctccattgagcggggacagaaaatcgccctgaccggcgccaacggcataggaaaaaccacattgatcaaaagcatcctcgggcttgtccctcccctttccggaacttgtgaaacaggggaaaatatagctccgggctattttgaacaggagggaggccacaacaataagaggacctgtatcgaggagatctggcaggagttcccttccttcactcagtatgaagtacgctccgcccttgccaagtgcggcctgaccacaaagcatattgaaagccaggtacgggtgttaagcggcggtgaacaggcaaaggtgcgcctgtgcaaactgatcggccgggagaccaacgtccttcttctggacgagcctacgaaccatctagatacagacgcaaaggacgccctgaaggccgctttaaaagaataccgcggaacgctgctcctcatctgccatgagcctgaattctaccaggacattgtcaatgatgtctgggactgcagcaaatggacgaccaggatcgtgtaggccggccggtcccttgtttgagacaaaaaaacagagagcgcttaaataataacagcgttctctgtgatctcttcaaatattttttacttaatttttaacatcaatcctcttccagcagcgcacatgccagtccctcatcgatcatgagaacattgatatacccgcctttgatagctgccttggcaatatacttcttatttcttccaaaagccaccgcaatacagtgtggtatctttctgagctgttctaacggaatcgcgatcgtccggtcctgtatatctgcgtcacacaggtttccgtcataatcaatgaaggttccgcatatatcccccaccacattcttactgcgcagttcttccttatccgccgtaaaattgtaccatgtatcactcgtattaggaagaatagcgtccagaagtccgagacccacgatcgcgatatccagattggcaagttcctggaaatgctttttgttgaagggttcttccaggagaagatcccgcagcacctttgtatgcacaagaagcggcacatgcatggcatgagggatcccacctaatatctttgccaggtcgatcgccagaaaggaagagcagttgctcatctggtggctcgcatccccctgcatctggaatacatcaatgttataacggtcgatcgcctgcaggcggtaaattatgcttgcgatcgtcgtccctgccgaaactccgatacggacattttcgctgactgcgttcttcagataatctgctgtggactctccgatcgctttcagtatcagctcgttgtcattcttgtcattgaccacgcagacatgctttaacccatattttttctccagcttcttttccagttcatattgatacatggaagtattcttaatatgaatagatacgattccttcatcaatacagttcttcagtatccgtgatacagtagttctggaaatattcagttcttttgcaatttcttgctgtgacaggttctgcctataatacatatttgcaacctgaactttcatatctaaacgattcggggacatctcattcactctcttccctctcctgttattttcaaaagcggcagcacatttataccgtcgtaatatctggggatattatatcatatctcctaataattggaaacactttgacttttcttaattatccgggtctatgacaattttaatcgccgtctggtctttcagtaattcaaacccgtgtttgatctgcgaaagcggcaatctgtgagagacgagggacgcaaggtccagtttgcctgctgccgcaaggctgataacgtttctccatgatgtcgtattgtaacccatatggcctgttatactgacagatttgacattcacttcattcataccatacccataaggcttgtcgttcataccgatacgcaccacgatcccgtcattgcggacgatctccaccgcctgttttaatacggcgggcgcgccggcggcatctatacataaagccgcgccgctcataccgcagattttatccacctctgccgcaagatcgacaccttccccatttataatggtatgggtcgcccccagcttacgcccgcacggaaaccgggattcctcatcggacggcatgccgatcagtatgatcttggcagcccccgcgatcttcgccatctgtacgctgaaaagtcccaacgcaccggctccgaacactaccacgttctcccccggcatcatctgcccttcctgtacgaccgccatatatgcatttgcggcaggctccagcagcggcgctgtctccatggggatctcttccggcagacggaacagacagttgggatatactgccagcagatccccggggattttaacatactgtgtaaaggccccgtcgacactgcatcccaatgtttccctctccgggcagttcacaaagtttcctttctcacaggccgggcaccggccgcatacggaggctgtattctccgatatgacccggtctcccacattccagtacgtgtcggcatgcggacccatcttggcgatcgttccggcaaactcatgtcccagaatgataggatactcaccgagacagggcagcgcgccattataaaaatgtacgtcaccgccgcagatagctgctgattccactttaataagaatatccctgtcaccgcattctggcttctgtacttcccggatctctgtctttccacgttcatataatactaaacctttcatcttgatccttctttctgctttataatatagtgttttctgttatctctactttctttctcctgactgtattgtccgccttccacgccataccttccgacccaagtatagtgatgaaatgcttcaggcgcaagccgtacccttcttctataatgttggcaaaaccataagcgccgcttcccgatgtatctgcattttcaatagcctcaatggcagacgcaaaaagttcgcatccgatgttcaccttattgattcccatcctggcagcttttttaaggccttcatcaccagtccctgaaccaccgtgaagcacaagaggaaagttgcccgtcaccttttttatctcctcgagcctgtcgtagtcaagatatgggatctgccctttatcataggcgccgtgggccgtaccgatcgccactgcaaggcagtcgatcccggtctcctctataaaccgttttgcaagttccggttctgtcagagccgcatctctgtccgcctcataattgctggcatttcccacatgaccaagctccgcttccacactgacgcctgccgcatgggcaaccttaaccagttccttcacctgggcagcattctcttcaaaaggaagttccgagcggtctaccataatagaggaaaaacctgcgcggatacacgccaccgccgactcaaaatccgaaccatggtcatgattgaccgccaccggaactttcgacgcttcggccagggccttcaaatatctcccgaatagatccacatcataatcaaaaatgagcgggacaagcagaatgaccggagaattcatctcttccgcacacttgatcgctgtacgggcatttaattctgtctgcactaccggcgccggcaccgcgtaatttccctcattggctctgtctaaaatttctttcattgtcactaacatactctatacctcctgtatttcattttcgcttacagttccttctgccggttccagaaatcaaccgacatgtcatatgcttcctgataaagctttaactgttcttcataccaggcagccttttcttccctgggataataagtcttttcccgcacaggttccggaaatccgtcctgtaaagtgtaatatccaagcgccacaccggcgcatatggccgcgccgcggcagcctgtctcccggtcttttccgatatgcacagggcgcttcagcacatctgcaaacatctgtccccagatattgctttggcttccgcctcctgtcatccatatttcccgaaacttttgtgtccgaacttccagtctgcgtatctctatgcacatggtgatgcagattccctgaaaaagagcgagcaggatatcttctttcgttgtatgtgacgtcattccaagaatcccggctctggcggaactgttgtaaaatgtcccaagcagatagggctggaacacaatgctgctctctttcttttccgccagccgcgcctccagaagttcaaacacactgactcccttctcttttgcctcctgttcttccccggaaaacatcagatctaacaaccagttcatggtattgcatccgcttccgatggatgtggtgacagtctttatttcccttgtgatccccccaaacagaaagctctcacccgggacttgtactgccggaagccttgccgctgcgtccagcacggcaatattgatgccaagcgtacccataatgacagcaagatgaccctgtttatttcccccgcttccgatagagcaggcgatcatatcatgggcgcctgccgcaacaggtgttcccgccgcaagtccggtcagctctgccgcttcttctgtcactgcgccgcatatttcactggcatatacgagaggcggaagcatagtgatacattctgcgatccccgctgtttccagacacttggttaaatactctccggtatccagatccaccggtgccggcggatcggacatatctgcgttcgccttccccgtcagacggtaccggatccaatccttgctcccgaggatccaccggacctttttaaatacttctggttccttttctttcagccagagcataaatgccgcggtcctcgggatctctgcctctttttgagtctcagagtggtccatgacctcttcgtgacggctgtccatagacaggacgccaggatatacggcttccccgtcctgcgacacaagaaaattgccgccgccctgtccggagaacgagactgccgccacttcctcccggctgataccgcttttgcagaacagctcccggacagccgccgcggcctgctcccacatcagttccatatcctgctcagcccagcccggcttcagacttctgatcggctggcatctgcgcgactccaaacagacgacctccgcatttacagtgtaaaatgccgccttaatctccgactgtcctctgtctattgttaaaaaatattttttctccatcgtctcaccttttagaacagctcttccatactaattcatcttataggaatatggttcctctttaaaataatgccggatctcattgagcggactttctattgacctcaggataaagtctccgccgtttcccgccacatgaggtgtggctataatgttgtccagcttcagaaacggatgtccgtccggcagaggctcatccgagaatacatcgatgcccgcgcccgctatcacgtgttcttccagcgcctttataagcgcctcttcgtcgatcaggccggccctcgctgtgttgaccaaatatgccgtcggtttcatcagcgtaagaagccgctcatttatcatcccgtgattctctggggtcagcctggcatgtaccgagagaaaatcggctctctggaataattcttctatcgtgcctactatctccacgtccattttctttgctgtttccgggtccgcccacggatcgtaggttatgatgctgcatccaaatccctgcagtctctttgccaccttccgggcgatggcgccaaatcccagaaggcttaccgtggaatttttcatcattccttccagacccatcacagaatccttccattccccttttcctcccatatcgttccggggcagtcttcgcatcagggccagcattaaagttaccgcaaaatcagctaccggttctgccgcacgcccgggtgatgcacatacagtaacgccgtgctccttggcggctttcatgtctacattttctactccgcttctcatgacacagagcagcttcaaccgctgtgccgcttcaaaaaaccgtctgtccgcgccggaataatgcatgatgattatatccgcatctctgatcgactccaggaactgcggggtatgttccacccagtccggcccttctttctccagccgcagattcgcctcccgcatgttcccgcccgctttattgagcgcgcccagatcctctgtaaatgcatactcgaccccgtattctttaaattcgtcaaacatctgaggaatgcctcttacttccagatcctgttttgtaatcagcccttcagatacaaatactatttttgtcatcttcttctctcctcctgcctctttattttttatgtccttttgaccggatcaccaccaccatgatgagcgcgaacagaagcatcccgccctgtacataattcttaagccacagctcgcttgtgatcatcagaagcccctgattgatcagagcatacagcacggcgccgacaagtgtccccggcacattaaacaccccgatcttcccataggcggcgcccaggaatacggttgtcagagcggggacaaacatgttctccccaagcgtaggggatgcggcattcatctgagacccctgcatgatccctgccagcccgcacaagacagctgtgataacaaaccctttcaccttctgcatcctgccgtctattcctatgtaatcacaggccgtcgggtttgcccctaccgcataaagatattttccggccctcgtatactctgtatagaacaggatcagcgcccccgcgatcaccagtatcacgaccggcatcgggatgataccgaacagatacccttgtcccataaacgtgaactccttcggccatgccgaaagattgtttacatttttactgttagtaagcgcttttgccgctcctttgacaagatacgatgtcccgagcgttgcaatgaaagccgggatcccgatcttcacatgcagaaatgcattgtatattccaacaaggccaaggaccagaagtgtaagaagtaccgccccgatataattatgaaaggaagtccttcctaatatgaccgccatcagacaggatgccagagacacctgcgcccctgctgaaaagtccagttcccctgtcgcaaatatacaggtaagtcccacccccataacacccacgatgcaggcgttgctcaatatattcagcaagttggtgacctgcaggaacgcgggagagatgatcccaaatacaattgccgttgccgctgtaaagaacagcagccagcgccgtgccaacattccgccgaaaaattccggctttgatctatttttatccgccatcttatgttcctccttccgtcagctctccagctttacgctcggcagaccgtcttctttgatcagcgcgatgatcgcgaccgcgaccgtcagcaggagcccctgcacgatatcttttacgtagatcgggtaccctgcgctgatgacgccgttctggatcacgatcataagaatggctgccagcaccgtcccgggaacgttatatttgccaagcttaaggaacgtggcgctgagcatggtggccgcaatagcaggcatcagaagttctgagcccatagtcagagacacgctgttgttgtaagaagccgctatcattcccgccagtccgcagaacacactgctgatcacaaacgcccacaccttcattcccggcacggagataccggaattgttggccgctgtagggttagatcccaccgcgtacagatgcctgccaaatctcgtcttttcatagaccaggtgcgtcagcacggcaagaccgagaaatacggccactgctgccggaagtattccgccgatgcgcatctgcattatattaaagctgtctggccagtccttggaataaagcgtagtcccgtcgttgagaagctgggagcatccgtccacaacagtggccagcgcaagtgtacacacgaaggtaggcacaccgatccggatcgtacagaaggcaaggaacaggccgatagctgccgatgccgcaacgctgataagaaacgccagaaacatattgttagaatccggggctgccagaaacttcccgaatactgctccgatgaccgtacactgggctccgatggaaaagctcatctcccctgccgccatcagtatcatattgccgagcgccagtacgcctataatgctgctgagcgccagaaggttcatcacattgttcagcatgagaaaccttggctgtaccgcctgaaagataagagcgatcaccacgagcgcaatgagcaggaatactctggacaactgctcttttatccctttcttctttcttatgtaagtatttttacccatcgatctttttccccctaactgccacactgaggatattctgtttgtcaaattcattccgttcaaagccctgtatgatatctccgtcggcaaatacatatattttgtcacagacattcaacagttcgtcgatctccgatgaaataaacagaactccgatccgctttgtctcctcttcgctgtctgtaagctggcgtaccttttggtagatctcaaacttcgcgccgacgtcgattccgttcgttggttcatctaaaatcagaagactgatattctcaatggcgatagaacggccgataattatcttctggatatttcctccggaaagactggatatagactgccccggagtattgtatttaacatcgttttccgaaagaacagtccccgcgaattccctgctttttccctgctttaccaatcccgggcctttgcctgccagttcttttttcaaaaacagattgcagatattatccacgagagacagcgccttaaacatgccgtctgcccgtttctcaggagtcatgatcattccccggtcaatcatcatccgcgtattgcacttcgttatggtctctccattgaactgatacgacttttcagccttccgcaggccaaacagcatctccgcacattccgtcctcccagatccaaccagtccgtaaaagccgacgacttctcccttatgcacccggaagtcaagctgatgttctctgccgtcgtatacggcatgtaccgagtccagaatcacgggcagttttgtaaagtctttttccatgacatttactcttccataagactttccggtccttaacattgccattatgacctggatctgcgtcaggttgtctactgaatctgtcagcgtatttttaccgtcggtaagtaccgctatccggtctgccaccgcaaacagttcttcgatcttatgagagataaatatgaccgcgatatccattttttctcttacttcttttataaatgccaggaacggctccacttctccttctcccagagacgccgtaggctcgtccagtatgaggaccttgggatcgttgtaaaaagccctcatgatctcgatcagctgctgttcgcctgcccccagttcttctaccgggacgtccagaggtatggacagatgcagcttatcccggatctccagcgctttttcatatgcagttttctcacttataaagccctttcccggctcattgccgagacatatattctgtgctcctgtcagcatgcccacaagattgcgctcctgatacaccatactgatcccggctttcattgattccgtcgtattgcggaagtttacgttccgcccttcaaaatacatctctccttcatcgatcggatatacgcctgtaagcattttacagaaggtgctcttaccggctccgttttcacctatgatagccacgatctctttgttatgtacttcaaaatcaacatggtcaaccgcgacgaaatcgccaaatcgctttgttgccccttgaaatcgcagaattgcttggttttccacactctttcacctgcctgtctgtgaattttacctgcctaccgtttcgtcaatcgccttgtcgatcatttccatttccccagcggtcagctcccattccgtgcttctgcagttttcaagagcctccttgacattgcgcacgccgcaaagcgatgttgtgacgaagtctttctgggtattccagttcaatgccacctgggctaccgggacatttctttcttctgcaattatgtcaagcgtcttcaaaagctccatgacctgggagaatcttggctcctgaaaatgaggatactggtacagcttgcggatgtcatcgtcgggcagttccggcagtttgcggatcgcgcccgccagaagaccgctggcgagagagctgtgagtcataacaccgatattgtgctcttttgcccagatcatattttcctcttccccgcggacgaccatagaatagccggactgtaccgccgtaatatctatatactgccccattttctccatctccggaataccgaaattggacacgccgagataacggacctttccttccctctgccatttattgacgcactcggcagtcacctcaaaggggacattagtatccggcacatgtatgagaaaaaagtcaacataatctgtccccagattcctcagtgactcctcaaaacaccgcgacatccactcgggcgaacagtcgggataattcggtccgctgccgtccgccggattccggaacccgcacttggtagtgatgagcaccttatcgcgcatgccctttattgcttctcccaccactttatcggactcaccaagcccatatacccaggcagtatcaatatggttgactccctgtccgatcattgcgcggacagcctcgatacagtctcctctttcaacagagccgtaaccaaggcctcccattgcccaagttccaatagtcatagtagatacatcaacaccagatttccctaattttttgtagcgcataattttcctccttgaatttttctgtttattgtaattggcccaattagttttaataattgaatgttagcatatgttcattctatttgtcaattgttctttttatcgagattatttaacattataatattgtattgacaaattaatttgtgcactttataatataaaacaacatatatatgaatcatttgtccattttattttaacatttgttcattttcgttatctcaaatgtgcagataacgtttgcaaatgttcagtcatgaaaggaggatatgctgggacaaggttcagaagagtaaaagcgatagaataacaaaagaacacaaggaggaacattatgaaaagaaagtttctaagcgtattactggcggcaagtttcgttttggcactgacagcctgcggcaaaggctcagatgattccggaggccccaaaagcgcttccaaagcatttgacgactatgagagacctgctgtcgcagacgaagaagaggtgagtattatttacttgatctcaaacatgactgacgagagcaatatccgctgcgaacagcaggctgctgtcgaagcggcacaccgcggctgggattatcaggtcatcaactatgaaaaggaagacaacttcagggaatacttccagaacgccatcagccagcagccgaccgctattatcatcggtgtcacccagtccttcgactcctatcaggatcttgtagaacaggcgcgcggcgcagggatcggtatttattcaaacgacaacagtgtcattgacggtgttatctccaactctaccatggacaacgcggaagcggcgaaagccataatggatcaggtcgtagcggaccatggcgctgaacttaaatacgccgtttatgagcttgcaatgtccgaggttatgactctccgggcagacgaggccaagaactacgcaaaggatacaaatctggaactgctcgattctatcgatcttgcatccacaggagatctgaacacggcagggtacactatcgcccagacatggctccagcagtacggaaatgaacttcagtttatcttctgttccgccgatacacctgcactgtcagcggcggaagctatcgttcaggcgggggacaagacaggcgaaaagacatttgtatcaggtgttgacggcggctcttctacctggagctatatccgcggcaacacaccgatcaaatatacgtattctcagccatttgaatattttactcacatgacatttgaggtcataaatgacattcaggtgaaaggcctgaaccccggcgatgacggatgtacgatctccaaagccggcgaatatatgacagcgcccggcatcgttacgaccgccgagaattgtccggccgcaggcgactctatccattcggtatttgatttctacggggaggatccggacgacgaagatgcgtggtataactggacagacggccctggcatatatgaggtcacccaatagcagctgctgctgcagaaaaagagccggaaacagacataactgcctgtttccggctctttgttacggacgcagaagcacacttgcgcgtcctgcgcatctgcccttctgccgttcatattacaggatcttagaaaggaactcctgcagtctcggttctttcggattgccgaaaaattcatccgggccgccctgttccttgatctccccttcgtccatgaagatcactctcgtcgccacttcctttgcaaatcccatctcatgcgtcacgactaccatcgtcatgccgtctctggcaagcttcttcataagctccagcacttctccgaccatctcagggtcaagggctgatgtaggctcatcaaagagcattacttccgggttcattgccagagaacgtatgatagctattctctgcttctggccgccggacagctgggacggatatgaattcgctttctcctcaagccctacaagcctcaacagatccatggcgcttttctccgcctcttctttgctctttttcaaaagctttaccggcgccagtgtgatattctggagaatcgtcttatggggaaacaggttaaaatgctgaaacaccattcccatcttctggcggtgcttgttgatatctacatttttccccgtaatatctgtgccttcaaaatacacatgacctctggacggttcctccagcaggttcagcgagcgcagaaatgtagatttcccggagcctgacggccccacgatcactactacctcgcctttttttatttcctcggaaactccgttaagggcatgcagttccccgaaaatcttgtgaagttcttctactttgatcaaagtctctccgttagtggtcactgctccttaacctcctttccagcatatttacaagcttcgtaaatatcaataccatcgccagatagataagggcaacgccgatgagcggcataaaggcgtcaaacgtctggctccttatgatgtcaccgccctttgtcagatcctgcatggcaatataaccggatacggatgtctctttcaaaagcacgataaattcatttccgagagccggcagtacattcttgaacgcctgaggcataataatatgtatcatcgtctgcgtataattaaagcccaggctgcgtcccgcctcaaactgcccgttgtcgatggacatgatcccggagcggaatatctccgccacatacgcgccggaattaatgccaaaggcgagcaccgccacgatcactttatcgatgtccatgctgccgaatataacaaaatagatgatcagcagctgaacaaccacaggggttcctctgatgactgtcagatacagcttgcataatagatttaatatcttaagcttccctgttctgtcatatgtggaacgcacgatcgctacgagaaaaccaagcgcgataccgataagcacggcaaaaaacgtgatctttaatgtaacgcccaggccgtccagtatatatttccacctggattttgttataaaattggcaataaatttatcctgcaatgtctgtaacatagtctacatccttatcttttattctgcatcatctgcattgatgtatttatcaacgatctcatccagcttgccgttatctttaagctcattcagcgcgtcatttatcttgcccagcagatcttcatttcctttgtctaccgcaagcgcatactcttcttctgtaaatgcctcatccaggatcttgatcccttccgcctgttttacaaattcttttgcaggttctccgtcaatgacaaccgcatcgatcttgccctgctgcagcgcctgaacagcctcaaatcctttattgtaacgttctacttccgcatcctcgatgtcacctgcgtatatatctccagttgttccaagctgaacaccgatcttcttgcctgtcaggtcatcaggaccggcaaccttgctgtcttccttcaccatgatcacctgtgtagcctttgcataagtatcagtaaaatctacattttctttacgctcatccgtaacagtaagacccgccgcgccgaaatcagctttaccgctcgtaactgccggaatgatagagtcaaaagccatatcctcgatcttcagctccattccaagcttatcagcgatcgcctgcgccacctccgcgtcgataccgaccacatcatctccgtcacggaattcatacggaggaaactccgcattcgtcgccatcacaagagtatccttagacttcttatccccgtcgtcactcttctccttcttgtccgaaccacacgcagcaagagaaaccacacaagctcccaccaacaaaacactgaccagtttcttcaatttcataaccatattcctccaaattcacctgattgatttttgtgcataaaaatacaagtctagtacatattttatcatgtttcccaagaaaaacaagagaaatctgctacaaaggaagaatttattcccggagctttacaaagctaggtaatatacgctaaaccaaagaaattcaagccatatatacctttcccaacaactatatccatgttaaccccctcttaaagcctgccgctgataaagctgttgagccttggcgaaggacaggaggcccgaagggccgcacctggccgctgcagaacgttcggaggcagacgagggagccgttgctgcaggaagagccggaatcggatacggggatgttatctcaaataacatccccgagagcctctgagggaggaaatcccttcaggatttccttccgaataggctcggttatccgattccggctcttcctgctgttacggatccccggctgccgcagcgcttctgcagcggccagatgcggcccttcgggcctccgtacaccaccaactccctcaaactttatcaccccagcaaaatctgaacacctgtgtatatgactatgattccgccaagcgctatcctataccagccaaacaccttgaaatcatgcttcttaatatatcccatcaggaagcggatcgccacaatagacagtccgaaagatacgacacatccgagcatgagcaggccaaattctgccccggtaaaatgaaaaccgaatttgataagctttataagactcgccccaaacatcgccggtatcgcaagaaagaaggtaaactccgccgcgatctcccttgaaacaccgatgatcagcgctccgacgatcgtcgcgcctgacctggaggtaccgggtatgagcgcaagcatctggaaaaagcctatccagagcagcatcggaaccgtgagatccgatatcctgttgacactcggttttctgtgagcgttgcggttctcaatgatgataaacagcgcgccgtacaaaataagcataacagctaccggaaacggtttatagaacagttcgtcgaggatatcattaaagagaataccgatgactcccgccggaacggaagctatcactaccttgatccacatctgccatgtaagcatcttctgtttgccggtctttttcggcgaaaacgggttcagcttatgaaaatacagtacgaccaccgccatgatcgccccaagctgtataaccacgttgaacatttccataaacccggccgacatgcttggcttcagcacatctcctacaagaatcaaatgaccggtactgctgaccggcagccattctgtgatcccctctacgatccccagaataattactttaataatgtctaacatccttttctcccttcttatacacattggataactgcagtccgcagcagcgtctgcgattttcctcacgtggctttcctgccgtaagactacaatacatattcttcaatgatctgcgcgacaccttcttcatcgttggatactgtcacgatgtcagccgcagctttcacttcatcggaactattggccatcgctatgccaagccctgcctttttcagcatctctatatcattcgcgccgtcccccagcgccagaatctcttcctttttaatatgaagcatttcgccaagcgcaagaagcgcatttcctttgttgacaccctgcacgcttacttctatattattgaccagcgcgccggtcacctcgattccttcgatctctcttagttcctcgagcgccttttgcttatccgcaaggctggcaaacaccgcctgcaccttatctaccgcccttccctcggattcaaacttttctctgatatctgccaccggtgtccttgtagacagaatataatctcccatagccgatactccaaagaagtctccgatccgcctgagcattttctcttccgcaaatccggctccgtcataatatacttctcgtagtgtatcataatgttcgtaaatatccaatacttttcgggcaatctccggcggaacaggcttttcatatataacgttgccgctcacagtatccacgaccctcccgccgttggccgtgatggcataccggatgccgggataatgcagtatttcctccggtattgcgccgagcggcctccctgttgcggggagaagcacgatccctttttcggaggcttttgtaatggccttcccggcacgctctgtaaataccttttctgtagtcagcaatgtgccgtccaggtcaaatgccaccatcttaatattctttatcatataccgtcagttcctttctgtctttggaaaacagcagcagtgactggctgattttgtctgaagagctctcatacgcctgtcttccgtggtctgccatctttcttacgacttcctcctgggcggctgccgcaaagagtaccatatctttcgtcggcgccatcacgacaatatcatccttaagcttatctacacatacctgccagatatgcttaaagcagagtgagctgcattcgtgatgtccgtccgctataatggcgaacgcgccgtaccatgtgtttcctattacaaattccacatcccggataagattttcacatgacttatggtatagttcttctatattacagtccgggggcagcatattgtctttgagcacttcaaacgtgtcctcaccccgcctgatcacaaatattattttcaggcctccggtaaaagatatgaccggtgtgtctttttccgatatatgtttcccgttaagcgcatggctgtccgtaagttcttcttttatccacggatatatggcatctttgatgttatcatatctatagtgctcttcttcatattttctcataacgtttttcctccacgttcttacattctatgttccattttaacaaaatttgctttataaagcaatttgttgtataatagaaaagcactcgctaaaaagggaaaggaaatgtatatgaagagtacgaaaaagaaacgtatattgcgtgctgctatatgtcttacttgcgccgtaacaattgcttctgttaatacatcggtatatgcagaaccttcaacaaacgagttggaaggaaagacatctgatctgcagggggagcttaaagaccttaacagtcagctgtcgaccttgtctgatgagctggacgcaacatcttccaagattgaagagctctctgcttcggttgaaaagtccaaactggacgttgccgctgcaaagctgaatgaagatgcccagtatgacgccatgaaggacaggatcaagtttatgtatgaaggcggaagcgcctccttactggaaatacttttttcctccgagaacatggcagattttttaaacaaggcagaatttgtatctaatatcagtacatacgacagacagatgttggacgaacttcaagcggtccgtgccgacattgagaagaaacaggaaactttagaaacacaacaagaggaattagcgggactgcaaagcgacctggaatccaaacaggaagcattaaatgcaaagatatcttctacttcaggtgaattatccaaatacagcgctcagctggaacgggcaaaagccgcggctgccgcacttaaaactgctcaggataattccgttgccggctccacatcagcgccgggcaaaaatactgacaatggtaataaaaacaacaatactgacggcagcaacggaggaactgtcaacaatggaggctccattgatgccaatgtaagtgatactgcgttattcgctgcaatacttgagtgcgaggcaggcggcagttacgatggtatgctggccgttgccacagttattatgaacagagtgtccagtccgagttatccgaactctatccgcggagtcatctatcagtccggccagtttgcgcccacctgggatggcagcctgaaccgggttctggcaaggggaccgtcgcagtcagcctattcagcggcacaggccgcacttggcggagcaagacacgctgccgttcttaattgttattcgtttaatgccgcatggacaggcgcttccggtgttaacgtaggcggaaacgtgttctggtaggccataagatctttcttttaattgtcacaaaaagtccgaaggagaaaccgatattctcttccggacttttttattacatattaatacttcacgtcttctactgatagtccataacgtctatccacttcatgaggaagtccttttccagctcgttgtcttttgtaagctgtgccgcagccactatcgggagccactgctgcacatactgccttgccgtatccgatttcctgcagaacattttcagatacagatctgccgtctcctgattctttaaagcaaagagcagatacgtcatggctgcgtccgcactggcattgccctgtgtcgcatgcgcccagtcaacgatcgtcatcttcccgttctttcccacgatcacattgctcgggttaaaatcaccgtgacatactttgtcatgcttcggcatactgtcgagccttgtgagcagttcatacctggtcgtcgcatccagctctttcaggctgttgatctgccgtgccagtttatcatgaagtttattgaggagaggcgccttcctgctgtgcatttccagctgaagatccacaaaatcctccatatatttctccagattgccggcgtctacgagcatcatctcttccagcgttttcccatccttatactcgatcacaattgaccatcttccgtcgatctccgtcacttctttcactttcggtatgtcaaggcctgcagcctctacccgcgccgtattcaatgcttcgttaaacacatcagccttcggatggtttggattgaataccttaacaatgtccttctcacatttatacactttcttatgtggcctctcaacgatcaaagcagctttctccatgttcatagtcttacctccttgtatgtatttacagctgttcatttatttgatattgtcattatacacctgccttctttgtttgaaaagacttttttgatatttttttaacttatttttggtactcataattatcgttaattatttaacatatagcaaagaacattattttatgcagttataccgtaagatacgatttgggacgcggcattttacattgccgcgtcccaaatccgtgggaaaaacttattatgaaaaattttgagagaaagctattgttttatttaccgtagtagcacttcaggtaaagttctttgatttccttcatcagcggatatcgtgggttggctcctgtacactggtcattgaatgcctgctctaccatgtcgtccaatgtatccaggaaatatttttcatctatgccataatctttgatcgtcttcttgatgccgatcttttcttttaaatcttcaagttttgccacaaagctgttcagcacttcctggtcatccttgccctggcatcctgcaaaccgccctaactctgcgtatcttgcaagtgcatggggatattcatactgtgagaatgttcccatcttcgtcggcacttcagcggcattgtatttcataacttccgtgaggaggactgcattggcgactccgtgcggcagatggtggaaagctcctaatttatgcgccatggaatggttgaggccaaggaacgcattggcaaatgccatacctgccatacaggacgcgttagccatcatctcacgtgccttcgggtcgtttgcgccgttttcgtatgcggacggcagatagtcaaatacatttttaaccgccttcatcgcaagcccgtctgtgtagtctgttgccataattgatacataagcttcgatcgcgtgtgtcataacgtcaatacctgacgcgctcgtaagtccctttggctgtgtcatcatattgtcaacatcgacgatcgccatattcggaagaagctcatagtcagcgataggccatttcactccagtgtccgcatctgtaatgatcgcaaacggagtcacctcggagccggtgcctgaagatgtagggatcgctacaaagtaagctttttcccccattttcgggaacgtatatactctctttcggatatccatgaaatccatcgccatatcttcaaagtttacatctggatgctcatacatcacccacatgatcttagccgcgtccatggcggatcctccgcccagggcgatgatcgtatcaggctcaaactgcttcatctggtcggtgcccttctgcgcgcactgcagtgtcgggtccggcgccacttcatagaagcatgtatgctgtatacccatctcgtccagcttttcctctattggcgctacataaccgtttttatataagaaggagtcagttacgataaatgcttttttctttttcataactgttccaagttcgtcaagtgctaccggcatacagcctttcttaaagtataccttctcaggtgttctaaaccaaagcatgttttctctcctctcggcaactgtcttgatgttgatcaagtgcttaacccctacattctctgatacggagttcccgccccaggaaccacatccaagcgtcagagacggagcaagcttgaagttatacaagtcgccgatgccgccgtgtgaggacggtgtgttgataagaatccggcaagtcttcattgccgccgcatgctttgcgatcttctcctgctctgccgggtgtacatacagagacgccgtatgtccgtaacctccgtcggccacgagctgttctgccttggcaagtgcatcatcaaatgtttttgccctgtacattccgagtaccggtgataatttttcatgggcaaattcttctgaaatgtcgacagattcaacttcaccgatgagtattttcgtgtcctcaggtacttccactcctgcaagcctggcgatctcatatgcagactttcctggaatcttgttgttcaaagcaccgttgataataattgtcttgcggactttatcaagctcctcgcctttctttaggaaataacagcctctgtatgcaaattctttctttacttcgtcatatatactgtccagtacagtaacagactgctcggacgcacatatcattccgttgtcaaatgtcttggagtgaatgatagagttcactgccatcctgatgtctgccgtatcatctataataacaggagtatttcccgcgccgacgccgagcgccggttttccggaagaatacgcggcctttaccatacccggtcctccggtcgcaagtataatatctgcgtctttcataaccatgtttgtaagctcaagagacggaacatcgatccagcctatgatgccttccggagctccggccttgactgccgcatccagtacgatctttgcggccgctattgtagatgccttggctgacggatgggggctgattatgatcgcgtttctcgtcttcagacagataagtgtcttaaatattgccgtagaagttggattcgtcgtcggtataaccgctgccacgagaccgatcggctctgcgatcttcttaattccaaacgccttatcctcctcgataacaccgcatgtttttgtatccttatatgcattgtaaatgtattcggcagcataatgattcttgatgactttgtcttccacgataccgcgtcctgtctcctctaccgcctgctttgccagcggaatacgcatcttgtttgccgccagcgcagcctcgtagaatattttatcgacctgctcctgtgtgtatgtggcaaatactttctgagcctctctcatagccttcattttggccccgagagtctctacactgtcaacaactgccggtactgcttccttcttcttcgccattttattgttcctcccgttaaagtgtttatctttctttctgggcctagtatagtacctcgttaaatatttgtcaatacttttttgatatttttttaacgatattttatctcattttatacactgttattttgataattttccaaaacgcactaaaaaggcggttcttaagctgtaaaagcctgaaaataaccgcctttttatgtagagcggcagcaaagaagacttgccgcgcgctttatattgtcaaattaataactaaagtttcatgaccgtaccgagattccgctcaagcgcagaatcgaaaataaatttcgccatggcgacgtcacatacagacattccgatattggagcacacgatccgttcttctttccgctctcttcccggcttgagccccgcaatgatctcacctgtctctgcatatatatcaggcagcccgtccggaaaatatcccatgctgtcaaacagaacatgctcatctttgctgtccacgatatacttatccgcattcttctggacgccggcctcccagaacgtgttcaagtcacagggaaggatcgtctgtcctgcgtgaagccactcttccttcacaacagccatattttctcttgttatgatcgttgcggaggacatgacatcacaattggccgccacttcctcaggggaagctgcttttatgatctctatgccggatatctcatcctttacctcttcaacaagacggtccatggattccttccgcacatcatatacgtatatttttttcaggtttttcagcttcttaacgataaaccttacatgacctatcccctgtacaccgcagccaaacataccaaatgtctccgcatccggatgcagcgctgccgcggctatagaagtaactgcaggtgtccgcatcgccgtgagccatgccccgtccataatgacaagcggaaagccggtcagtatctcatttaagatcatgagccccgatgtctggggcagtccgtattcttttggattcctcggataacattcgatccatttctcgccgcaggccatctgcccgggcacatatgccggcatagcgtggtaaaatacatcgtcatacggatgtatgccgatcttggcaggcatctcatactctttatttccgtgggccgtcagagtcttttcgatgatttccaatgtctcgtccgtatccggccctgcctcaatgcactggtcttttgtcagatatagtatctcgcttcctatcttgatctttctttcgatgctgtccttttcttttctcagcatttcgtccatgttcataattgtccctccttatctaaggtatcaactgatcgttaaaaattaatcgcgattaattttggatataaaagatcatgccacaaatctgaagactatttcctccagacatttcataaactcgtcagccttgcctgcagcgtctgcagacactccctgcgctctttcgtcaaggatatctttcaaataccctttgtacagatgaatgcttgcactgtttaaaagcttcgcatcacttctgctcagattcctgtcctttacacaatgctcgatcatcaggtaatctctgtgactgaaatcaccgtctataaatataacctccttcccttttccaatcatatccagctcctccggatacatctgataatattccttcattatctgatccagcctggcgctgtattttccaaagaacagattgtcaaatatctcgggtctctcaaatgaggattccgcaaaacacctccaaaccgcaaaatgaagcttcaggccgtcctgtatccgttcaaaacaactggccacatctttgaggtaccccctcagaaactgtagcgacgcatacaggacaagttcatccattcccgtgaaataacggtatatatttgcagggttacagtccatcacctttccgagccggcggatactcaacgcctggatcccctccttcgagagaatttcatatgttgcctttataaattgttctttggaaatattctctttcatatccgctccgcgatcaattaagttggcttcattatagtcccgcgctgacacgaagtcaagaggagctatatgaattccaaaaaggggtcgggcccctatggataattccataggggcccgacccctttttcacatattgatcagcttattttatacaagttcaagaagaacttccatcgcagcgtcacctttacgctgtccgatcttaacgatccttgtataaccgccgttgcgtcctgtatacttaggagcgatctcatcgaacatttttgcgacaaggtcaacttcctttgtatttttctttcttcctgcctgtgcagccggaacttcttttacaggataaagaaccttcatcatctcacgtcttgcgtgaagtctgcccggcatatcctttttaactttcttctcaacttcatcgtaaacagtaactttctttccgtctactacttctttcactctcttgccgtctttgtccttgcgggcaactttggcctttacagttacttcttcaaagttgtctttttctcttaccgccattgcaatgagaccttctgctaccttacggatctcttttgctttagcttctgttgtaacgatcttgccgttgttgagcaatgctgttacctgatttctgatcaatgcttttctctggcttgatgttcttccaagctttctatattttgccatctttctaatcctccattatccaacatctggttatgcttcttcggtcttactagccggatgccctgtcatgctcttttggtcttactgacagtgtgattttattatgtgggctactcctcgcctctgctgagacataagcctaattcatctaactttgccaacacttcttccaaagacttacgtccaaggttacgaactttcatcatatcttccggtgtcctgtttgtcagttcttcaactgtattgatcccggctctcttcaggcaattgtatgaacgaacggataactccagttcgtcgatactcatttccagcactttttccttctcatcgtcttctttttcgatcataacttccgctgcctgggcaacttctgacaggtcgatgaagagtttaagatgttcgctgagtacctttgccgctaagctgactgcttcgtccggaagcaaagttccgttggtatatacatctaatgtcaatttgtcaaagtctgtgatctgaccaacacgtgtgttctcaacagtaaggtttacacgctccaccggggtgtaaatagaatcaatcggaattactgcgattggtaactcgtcgtttttattcttgtcagcacttacatatcccctgccctttgtgatggtaagctccatgtataatttgctgtctgccccgccattcagtgtcgcaataactgtttcaggattcatgatctcaatatcctggtctacctggatatccgctgccgtgacaacgccttcgccttcaaattcaatgtaggctgtcttcggctcatctgtctcagacgtatttttgatagccagtgatttcaaattcatgacgatttcggtaacatcttctttcacgcccggaattgaactgaattcgtgcagcacaccgtcgattttcacctgactgatcgctgaccccggcagagatgaaagcatgattctccgaagagagttacccaaagttgtaccatatcctctttccagaggttccacaacaaatcttccatactttttatcttctgaaatctcagttatttcaatattcggtttattaaaatcaaacactaagtccacctcctgtggtgttacgggttattatttagaatataattcgacgatcaacatctcgtcaacaggaacatcgattgcatcacgtgcaggaagttccttaacagttcctttcaggttttcagtatctacctctaaccagtccggaactaaacgtcctcctgtaacttccaggatccctttgtatctcggagagcttttgtgtttttctttgatctcaacaacatcgcctgcttttacaatgtaagaaggaatgttgatctgttttccgtttaccatcacatgtttgtggtcaacgatctgtcttgcctcgcgtcttgttcttgcgagtcccatacggaatacgacattgtcaagtcttgactcaagaagaatcataagattctcacctgtcattccgctcatctgttttgcctttgtgtaatagtttctgaaaggtttttctaatacgccatagataaatttcgctttctgcttctcacgtaactggagaccatactcgctcatctttctgttagatctttttaactgtctgttggattttttatcaattcctaaatagatcgggtccataccaagtgaacgacatcttttaagaaccggaactctgttaactgccatatctacgatttcctcctaattattacagcggatatgcacgatccgcgtcactgcttgcttaaatgtaaacttccgcttttcggccgctcactagactcttctgcgcttcggcgggcggcagccattgtgtggtaccggagtcacgtccttgatgcttgttacgtcgatgccgcatgcctgaagcgcacggatcgctgcttctctccctgaacctggtcccttaaccataacgtctactgattttaaaccatgtaccaatgctgctttagccgctgtctcagctgccatctgagctgcataaggagtagatttccttgaacctctaaatcccagaccgcctgcacttgcccatgaaagagcgttaccctgtgcatctgtcaatgtaacaattgtattgttaaaagatgactggatgtgtgcttgtccgcgttcaacgtttttcttgacacgtttctttgtcactttctttgtaactttctttgccataataaaactaacctacactttcctttttattcattaatgtgttgcttatttcttcttgtttgctactgttctcttcggaccttttctcgttctcgcgtttgtctttgtcttctgaccgcgcaccggaagtccttttctgtgacggatacctctgtagcatccgatctcctgtaatctctttatgttcagagcgatctctcttctgagatcaccttctaccgtctgagtttcatcgattacagcactgatcttctttacgtcttcgtctgtaaggtctctgcagcgaatgtcagggctaacgcctgcctcgctgagaatacgtgtcgcactcgtccttccgatcccataaatataagtaagtccgatctctacacgtttgtctcttggtaagtctacacctgctatacgagccatgtgaatttcctccattttctttttttgttgttctgacgtgctgtcctgcccggcttttgccgcgtcttttcagcgcggaatgctgtgcgggcttgatttcgcttcgcttatctttgccggcttttgccgtgtcttttcgacatgggtacgccgtgccggctcgattccgctttgctccatctcgctgcgggctaccgccctataaagtcttcacaacctgtcttttatcaagcaagcttgaaaaagccagttttgaatcctttgcacgtctcaattggtttcatattgtctctaactggggagaggttggtctcccaggcgtgtcggtatgcgcgccctttccggccaccggatttaccgtgatgacgggccggtattataagcaatatacgaggatattcaccggctatggtgtttcccagtatattttaaatagtctacacactgcctggtgtgtctactatcagccgcctattttagtctgcataaactacatattgacttcaacgggattatccctgacgctgtttatgctttggattctcgcagataatgcgaacacttccttttctcttgataactttgcatttttcgcaaattggttttactgatgatctaaccttcacgtcaaatcctcctttcatccattgctctgcctacgttttccgcgcgcgtttccagtatttgcccagaaacacgcttatatattatagcaccgtctgtcaaacaaagtcaatagatatttgaatattatttatctctccagatgatccttccttttgaaagatcgtacggggataactccagtgttaccttgtctcccggcagtatcttgataaagttcatgcgcagctttccgctgatatgcgcaagcacctggtgaccgttttccaactccacctgaaacattgcgttaggcaatttctctactacttttccttcaatctcaattacgtcagcttttgacatattataaatcctcctgattctttttttccttattaaaatttttaagtatctgttttatcgctgcatcatctgctgctgtcatatcgaattctctcaggatcggctgtacatgcttttttttcttctttttcagcctgccaagagttctaattttaccgtctgctaaatatacatatgcatcatcggtgtccactataacataaacctgccctttatcatgacccgccttagattttgcaagcattcctgtctttacttcttccatatctactgtcctctttacttaaatcacttcgataaggtcaaaagtttcggttcatcgtctgttatcaataccgtattctcataatgagcagataaagagccgtcccgcgacaccacagtccagtcatcgtcaagccagtcgacttcccatgtgcccgcattgatcatcggctctatcgcaagtgtcatacctgctttgagctttacgccttttctgttcatctcataattcggtatctccggagcttcatgcagattcgttccgatcccgtggccgcacaagtcacgcaccaccccataaccgaagctctccgcatatcttccgatcgccgccgaaatttcaaatagataattgccttcttttgcgtactttataccttcaaagaagctttctctggtaacttctaccagtttttcggcctctttgctcagttctccgatgccgtgtgtcctcgcggcatcggaatgatatcctttatatatgacccccgcatcgagacttacaatatcaccgtccttcaatatacggtgactgtccggtatgccgtgaacgacctcctcattgacggatacacagatagacgccggatagccgttgtaattcaggaaggaagggatacagccgtaactgcggatcacttcctcccccagtacatctatgtccttggtgctcatgcccggatgtaatgctttggcaagctcgttgtgaacgatctcaagaatccgtccggcttctgtcattaattctatttctctgcctgattttatactgattggcatacgtcctacgctcctaagatttctacgatcgcacggaatacatcttcaatgtcagctgttccgtcaactgtctttaatataccggcattagtatagtaatctatcagaggctgtgtctgttcatgatacacagaaagccgcttctttaccgtctccggcttgtcgtcatcccgcaggatcaatccgcccccgcacgtgtcacagatgccgtccttctctgtcggcgcatactcgagatgataggtggcgccgcatgtgacacaggcacggcggccgcccatacggcgtatgatattctcatccggaacatcaacgtctatggcatagtcaaccttctgtccaagctctgcaagcgctttgtccagcgcctccgcctgcggtattgttctcggaaaaccgtccagcacgtaaccgtcccggcagtcttcctggttcacgcggtctaccaccaggtctacgacgagttcatccggtacgagaagaccctggtccatgtacgtcttggcctttttgcccagttccgttccatttttaatattcgctctgaagatatcaccagttgaaatgtgaggaatactgaattttgcggcaattttttttgcctgagttcctttgcccgcccccggcgcgcctaacataataatcttcataatatgtgttcctccttatagcattttaacccgcagaaaaaaaattctgcgagttcaaaatggtgttaattatttaaaaatcccttgtagttacgtacaagcatctgtgattctatctgcttcagagtctccaacacaacgctgacgataatgataagcgatgtaccgccgaaagatactttcgctccaagccagccgttaaagaatattggaacaatctgtataagtacaaggccgcatgctccgacaaaaataatgtaattcaatattctcgtcaaatattcaactgtcggtttcccaggtctgataccagggataaatcctccgcttttcttcatgttgtttgctatctccaacggattaaatgtaatcgatgtgtagaaataagcaaagaacacggtcaggatgatatacacgagtaatccccatgaatatttcaagtgttccggattgcaccagttcccctgattcatgccgcgcaggatctcactgcctatccccgtgccgccgtctttcccgaggaaagacgcgatcacgatcgggaactgcatcagtgaggatgcgaagatgatcggtataacacccgcggtatttatcttcagcggtatgtgtgtggactgaccgccgaatgtttttcttccgactactttctgtgagtactggactgcgatccttctctcgccgtcctgaaggacaattacaaatacaaccagcgcaaggatgatcgcaaagatgataactactgccagtcctcccgaagcaaggctttttcctttgacgaactgttcaaacagtgtcgacatatcgttcggaatacgcgaaataatatttataacgagtacgatagaaataccatttccgactcctttttccgtaattctttcaccaatccacatcagaagtgcactgccggcagtcagcgtcagaactacgattgcggcatttacaaagttatactctacaagaaggcctctccgtccgaaaccgaccgccatcgcggtggactctataagggcaagggctaccgtgaggtaacgtgtgatcgctacaatcttctttcttccgtcctctccttctttctgcatttcctcaagtttcggaattgcaatcgtaagaagctgcatgatgatggaagatgtaatgtatggtgtaatactaagagcgaatacagacatctgctcaaaggatccaccggtgaaagcgttaaacaagttaaacgcttcccccgtattctgtgcaaagaaatctttgatataacttggatccacaccaggtgttggcagctcagatccaattcttatcacgatcaacatcaaaaatgtatatccgatttttttgcgaatatcctttatttgaaatgcctttcggaaagtttctaacattagatcacctctgcttttccacctaaagcctcaatcttagctgcagcgcctgcactgaacgcatttgcctgtactgtaagcttcttcgtcaactccccgttgccgagaatcttgacgccgtctttcgggttcttaacgattccctgttccagtaatgtttcaactgtaacaaccgcatcattatcaaacacctcaagagcgcttacattgataccaacgatatctttagagtttctgttcgtgaaacctctctttggtattcttctatataacggcatctggccgccttcaaaaccaggtcttgtagctcctgaacgagctttctggcctttatgtcccttgccggctgtcttaccgtttccagagccgtgtccacgtcctcttctgaaattatcactctgttttgctccgtcagcaggtcttaagtttgataagtccattgtgacacctcctatctgattgttatattatacttcttcaacttttaccaggtgacaaacctgtttgatcatacctcttgttgctgcattatccggcagttcaactgtcttgtttaacttcttaagtcctaaagcttcaacagttttcttatgctttggcacagcaccaattgtagattttactaatgtgacttttaaatttgccattatgatctacctccttagcctaagatctcttctacagatttaccgcgaagcttagctacttcttccggagtctttaactggcgtaatccgtcgatcgtagcaagaactacgttctgcttgttgttagaaccgagagattttgtacggatatttttgatccccgccatctcgatcacagcacgcgccgggcctccggcgataactccagtaccatccggagccttcttaagtaacacggaagctcctccgaatttaccgataaaatcatgtgtaatactatcgttctcatctaatgctacagtaataagattttttgctgcgtcttcttttcctttgcggatcgcttcaggaatttcagtcgcttttcctaaacctgcaccaacatggccgtttccgtcgcctacaactactaaagctgtgaatctgaagttacgaccacccttaacaaccttggtaacacgtttaattgataccactttttcatttaattctaattgaccagcatcaattcgtacttgtttcatgtgtgctcctccttctagaaattcaacccagcttctctagctgcgtctgctaatgcctgaacttttccctggtatataaagccgcctcggtcaaagacaacatctttaatacctttttcgattgctttttctgcaattacttttcctaaatatgctgctgcttttacgtcgttggtcttttccaagtttgctttcacatctttctgaagagtggaagctgcaaccagagtgctgccaactgtatcgtcaataatctgagcatacatatgattattgcttctgaacacggctaaacgcgggcattcagacgtaccgctgaaacggttacgtaattttctgtgtttattaacacgaactttgcttcttgactttttgctaaccattttcacactctccttatttatttcttaccagtcttaccaactttacgtctgataacttcatcagcatacttgatacctttgcccttgtatggctccggtcttctcttgtctctgatctcagctgcgtattggcctactttttctttatcgatacccttgacgatgatcttgttctggccttccatcactgtttcaacgccttccgggtctgtcatctctaccggatgagaatacccaagactcaatgtcaatttgtttcctgattttgccgctctgtatccaacaccgttaacttccagaaccttctggtatccgtccgtcacaccaacaaccatgttgttgacaagtgttcttgtaagaccgtgtaaagatttcatcttctttaagtcgttcggtcttgtaacgatgatctggtcgccttcctgcttgatctccatctctgcaggaagttctttttcaagtgttccctttggaccttttacagtcactttattattctctgcaatctcaacagttacgcctgccggaactgcaactggcagtcttcctatacgtgacatacctaatcctccttaacttaaattctcggaaagagcgtctgcgctccctctgttttcagttgtttctaatgttattttcagtctaccagataaaagccagtacctctccgcctacgccgagctttcttgcttctttgtctgtgatgacaccctgatttgttgaaatgatagctgttccgagtccgcctaacactttaggaagctcagcctggctagcgtatacacgaagacctggtttagagattctcttaagtcctgtgataactttttcattcttgtctgcaccgtattttaacgtaatgtggatcgtcttgaacacaccgtcttctacgatatcatatttctcaatatatccctcatctaataagatgtttgcgattgcagtcttcatctttgatgcaggtacatctactgtatcatgtttagcagtattcgcgttacggattctcgtaagcatatctgcgattggatcactcatagtcatgtgaaatgtcctccttcctcttaccagcttgctttctttacgcctgggatctgtcctttatatgccaactcgcggaagcaaacacggcagattccatattttcttaaatatgcatgcggacgtccgcagattctgcaacgattgtattctctggtagagaacttctgcttacgctgctgtttaactttcattgctgtcttagccataatttacctccttattttgtaaatggcatgttgaactgtgttaacaattcacgcgcctcttcgtctgtcttggcagttgtaacaaagatgatatccatacctcttaccttatctaccttatcgtattcgatctccgggaagataagctgctccttgataccaagtgcatagtttcctctgccgtcaaatgcattcggattaacacctctgaagtcacgtacacgaggtaatgcgaggttaaccagacggtcaacaaactcatacatcttttctcctcttaaagtaactttacatccgattggcattccttctcttaacttgaagttcgctacagattttttcgctttacagataactgctttctgtcctgtgatcttctccaggtcagcgacagctgactctaaaatctttgcattgtcttttgcttcgccaacacccatgttgataacaactttatcgagttttggcacttccataatatttttataaccgaactttttattcatcgcttcgacgatctcgttctggtactgttctttcagtctactcaaagtcatggacctccttcctcaaattaatcaatcacttcgcctgttgatttggcgtaacgtacttttttctcgccctctgtcttaaagcctacacgtgtggcctggcctttgtgcacgtacattacgttagaaacatcgataggtccttcctgatgaatgatgccaccattctgattggaagcacttggtttcgtgtgctttgtcagcatgttgactccctctacggtaaccttaccatctttctggttaacggcgacaactttaccttctttgtctttatctttaccggcgataacctttacagtgtcgccctttttaatttttttcattgacatcttgcgcgcacctccttatagtacttccggagccaaggagacaattctcatgaactgtttctcacggagctctcttgctactggcccgaagatacgggttcctcttggtgtcttgtcatcttttataataacagcagcattttcgtcgaaacggatataagaaccgtctttacggcgagtactgtttacagtacgaacaactacagcttttactacatcgccctttttaacaacgccgcctggtgttgcatctttaacagtcgcaacgattatgtcgccgatgcttgcatatcttctcgttgagccgccaagcacacggatgcacagtaactctttagcacctgtattgtctgctactttaagtctgctttcttgctgtatcatgcaggtttccctccttatactatttcactttttccataacttcaacaagtctccatctcttgtctttagacagcggtcttgtttccataacttttactttgtcgccaatgttgcattcgtttgcttcatcatgtgctttcaatttatatgttctctttacgatcttcttgtaaagcggatgttttacatgatcttcaaccgcaactactatggtcttatccattttattgctaacaaccttgcccacgcgggtttttctaagatttctttccacagtttatgctcctttccggattattccgcagcatttgccttttcagtgattactgtctgaattctggcaatgtttcttcttacttctttaattctgcttgtgttgtctaactgatttgttgcgttctggaatcttaagttaaaaagttccttcttagcagctactaattcttcgttcagctctgcagctgattttgtttttaaatcttctacaaatgcattaattttcactgttatcaccgccttctaagtctgcgcgagaaactactttacatttacatggcagcttgtgagtcgccagacgaagagcttctctggccacttcttcagacacgcctgcgatctcaaacataacgcgtcccggcttaacaaccgctacccagtattctaaggttcctttaccagaacccatacgtgtttcagctggtttcgtagttacaggtttatcagggaatattttgatccatactttaccgccacgcttgatgtaacgtgtcatggcgatacgggcagcctctatctggttggaacggatccagcagggctccatggcaacgataccatattcaccgtttgtgatcttgtttccacgaagcgctttacccttcatggaaccacggaattgtttacgacgtttaactctttttggcattaacattatttatcgctcccttcctttgctgctttttccggaagaacttcgcctttgtaaatccatactttaacaccgactttaccgtaagtcgtgtttgcctcagcgaatccgtaatcaatgtctgctctcagtgtctgaagaggaatcgtaccttcactgtagaactctgtacgggccatatcagctccgccgagtcttcctgatacagaagtcttaacaccgagcgctcctgctttcatagttctggacatacaggatttcattgcacgtctgaaagaaatacggttctccagctgctgcgcaatgttctcagctactaactgagcgtctttgtccggtcttttgatctctttgatgtctacgactaatttcttgtctgtgaacctcttaagctcacctttcactttttctatctcaactccgcctttaccgatcacgacacctggcttagctgtataaatgataattttaacgcggtcggatgctctctcgatttcaatatcggagattcctgcgctgtataatctctttttaagatacgttctgatatcatggtcttccacaaggtaatcggcgaactctttttctgcgtaccacttagaatcccaatctttaataacgccgactcttaaaccatgaggattaactttctgtcccatgtctgccctccttatctttcatcaagcacaagtgtgatgtggctcatacgtttctcgattctgtaagcccttccctgcgctctaggtctgattctcttcattgttggtcctttgtttgcataagcttctgcaatgtaaaggttctcagcgttcatgccgttgttgttctcagcatttgcgattgcagattctaataatttctttattaaactagaagcatatcttggattgtaagttaaaataccaagtgctgttgttacatccttacctctgatggcatctaatacgaaacatgctttctggacagaaactcttgcataagataactttgcagaaggtcttgtgtctttgttagcatttctttctctcttgatttgggatctatgtcctttagccatggatgaaccctcctttcaaatacgttattactatcttactttagatttcttttcgtcttttccatgtcctctgtatgttctcgttgccacaaactctccgagcttgtgtccaaccatatcctctgttacatatacaggtacatgttttcttccgtcatgaacggcaattgtatgtccaaccatgcttgggaagattgtagaacggcgggaccaagtcttgataacagacttatctccggatgcgttcattgcatcaaccttcttgagcaggcttgcgtctgcgaatggtccttttttaattgaacgtgccataagttctaacctccttgtaaactatttaatcgctttaccatctcttcttcttacaatcatcttgttagaagctttgtttttctttctcgtcttaagaccaagtgctggtttgccccaaggtgtacatggacccggacgtccgattccagtcttaccttcaccaccaccgtgcggatggtcattcgggttcataacagaaccgcgtacagtaggtctgaagcccatatggcgtttacgtcctgctttaccgatgttgatgaggttgtggtctccatttcctacaacgcctacagaagctctgcagatgatcggtaccattctcatctctcctgacggaagtctcagtgtcgcatattttccttctttcgccatcagctgtgcgctgttgcctgcggaacgaacaagctgtccgccttttcccgggtacatctcgatgttgtggatctgtgtacctaccgggatctcagaaagaggaaggcagttgccggcctttacttctgcttcaggtccgttcatgaccttcatgcctgcttttaacccttctggtgcaaggatgtaagctttctcaccgtctgcatagcagatcagcgcgatgttggctgttctgttcggatcatactcgatacctacaacagttgccggaattccgtcttttcttctcttgaagtcaatgattctatattttttcttagctccgcctccgcggtgtctaactgtaattttgccttgattattacgtcctgcctgtctgctctttggagctaacagagatttttctggagttgtcttcgtgatttccgcgaaatctgatccagtcatctgtcttctggaaggcgtatatgggttatatgttttgattcccatgattgcttctcctttcaatactgtttattatcacggtttctgtccgtatactttgagcacttaacgaggtccttgttgcctcttataatccctcaaagatctcgatatctttgctgtcttctgtaagctgaacaaccgcttttttagtcttcgccgtcttgccgaactgcattgtcccgcgcactctcttcttcttgccgtcacagttcattgtgttgacgttctttacttttgctccgtcaaacatcttctcaacagcttcttttacctgagattttgttgcctgcgggtgtacaaggaacgtgtatttcttgtcgcccataagctccatactcttctctgtaactaccggtttaaggattacatcataatatttaatatcagccattatgcgtacacctcctcgatgttagcaacagcagctttcgttgcgatcactgtgttgtattttaagatgtcgtacacattgatcgtattagtctttgctgttttaacatccgcaatgtttcttgctgaaagttcagcgtttgtgttgccgtcttctaatactactaatgctttggatacatccaggttctttaatacgtttgcaaagttctttgtcttgatctcgtcaaatgcgatctcatcaacaacgatgaacttcttctcttccaccttagttgtaagagcagatttaagagcagctctcttctctttcttattcattttgaatgaataatctctcggtgtcggagcaaatactactccaccgcctgtccattgcggagctcttgtagatccctgtcttgcatgaccggttcctttctgtctccatggttttcttccgcctccggaaacttcagaacgtgtcttagctttctgtgttccctgacgtttatttgcaagctggcttacaactgccatgtgtacgaggtgttcgttaacttcaacaccaaacaccgcatcgtttaagtcgattgtgccaacttctttaccttctatattgtaaacagatacgtttgccatctctagtttcctccttcctgagtcacggcttaaactgccttgactgcttctttaattgttactaaagatttctttggtcccggcacagaaccctttaccaaaagtaagttgttctctgcatcaacgcggacaacttcaaggttctgaatcgttatcttcttgcttcccatatgtccgggcattttcttgcctttgaatactttgctcggatcagaagcagcaccgttggaacctgcgtgacgatggaacttggaaccatgtgtcataggtcctctgtgctggttatgtctcttgatcgcaccctggaaacctttacccttggaaaccgctgtggcgtcgatcttgtcgcctgcttcaaagatgtcagctttgatctcctgtgccagttcatattcagatgcattttcaaacttgaattctcttacgaatctcttgccggatacacccgcttttgcaaaatgtccctgctctgctttggtcacaccgtggcggtgaacaatttccttcttaccgcttttgtctttgttgaccgtcttttctttcttgtcaacgaatccaacctgcactgcatcataaccgtcattctctgctgtcttgacctgtgtcacgacacaagggccagcctgaagtacagttaccggtgtcaatgtaccgtcttcgttgaagatctgagtcattccgacttttgtagctaaaatagctttcttcattataattacctcctgtgatttacagcggaacgccgcttcggacgttcatcctaaattttaggaattactgcgtcttatttgtttttcattttgatatcaatgtaaacacctgccggcatctccagtctggataatgcgtctactgtcttctgagtaggtgtgatgatatcgatgagtctcttatgagtcctctgctcgaactgttctctggaatctttgtatttgtgaaccgctcttaatattgttacaacttccttctttgtaggaagtggaaccggtccgctcacctgtgatccatttttctttacagtttcgatgattttctttgcggatgcatcaaccagctggtgatcatacgctttcaatgtgattctcattacttgacttgccataaaaaaagtcgcctccttttcgtacttataacttcagtacgacaagcggtgactgtacactctcccgtgtgtgtcgtgagaaactcacacgttgttaccacatcccagtggccgttatagttcgtacagtgacttgtcgccagtttcctaacttgacattcgctccacggaaaacctgccgtttacgggcagcaacctcacgcttctacgctatcaatgtcacagcttttttagtatatatgaaacaatcgctttttgcaagcctttttatgtagatattgtattttttttgatacaatccatactgcaaatactaagagtcttctttattttcttcatctcctgcagcctttacatattccagctcatatatttcgatcgactccttcagccgccggcattcctttctaagcgtataaacctgctcgtccatctgcgctcccgcggcgtcggcacagcggcgcaccttctccgcacggccttctatccttctcgagaattcatctccgttcccttcgcttacgatccgcccaagcagcgcgaagatgtccatgtgccgatgccgtgcctcttcccggcagtattccattttcttaagctcctcttccgtctccgccagcttaagctccagttctctccgtctctcttcgtattcttcgcaatacttatccatttcgcccattcttcacctccatcgtatcggcgatgatacgctcactctttttcttccccgtaccactcttcatctgtaatttcaaaatgtctgttttgagtatttctatcaataagtgttttcccgtctgattctctttttaccacttcacgcacataacaatcctccggggctattccggtaaatacctgtacttctaacaaacttcccaaaataaccacttcatccaccgcccattccatagcagaaatcttgtatccctttttcaatgtatatgttacttttgtatagtctttattaatgtttatttccatatctttttctctattgttttctattcttgtgtttatagcctcttctcttgtgcttatccaatgctccaattgtttccccgtcacactcaaagtaagggtcccatctccattgtcatcaagcttatcaaaccataaatggtcttcattcccagcttctaattcctctatcgaatcctctatcgtcccagctgaaaaccgatatgaattaactaaaaaatcaggcagtataaactctttcgtctctccttcaggaatttttatattccgttctattctcacttcatcgtttgacacttttatttttgtcggccaaagctccaatcctctttcatatgcgtatattacatataatactagcagtatcacaacagccagactgataaagccaaaagccctttttattcgctccattttttatctccccataattatcctattggtaccggaacaccacttggaaacggatgcaaaatccccgtagtttcaaaggtcctccttggcgcatctgcaggttcaagtttataggcctccattttcgagtctgagtttgtcgggcggtattccaggccgactttacttgtaacaaaatttatttcttcacaagtcgttgaggccccccactcaatctttactgagttttcatttgtggaataactaatttctgtataagccgttgacttactgtctaaattgaaagactgcttgatactgctttccgtatcgcttattttactcttcagattcccaatctttactccccactccgccagtatttcccggttcttggatatggccacttccacagattgaggattatccaggtttgtctctatacttttctccactcctgcgtacagcactaatccgtcagccagtgggatttccatctcaccgtccagcagctgtaccgacagattcggaatatatttcccgataattctcgctatcttgtcggcgtattccaactgctcttttgcatccagcgccatgaactcctcttccgcaagcagtttatctccgagctgctttttcaactctcttgatttgagtacggtctgccattttccctcaatatccgtaaacagctgcaggtttaccggagccatggcatattggtttgcagccgcattatatcttaccccttgcatagccgacacggctgatgcaagagctttctgcatagtttgcgcccctgcgtatattcccgatgtagcagccagcatttcccctatcttctctatatttctcctgtactcttctacaatctcataaagggtttccaattcctcccgatacgaattggcaatatgctggtaacctctgatatccatatgaacggaagagggacggccatttccgagtatgctccttatcgtttccatgataaaactcagacaggaattcaattggtcatactgtactttcagcgcctcatattcacttctccacttatcttcgtcaactaccattccctccgaaaaatactgacagatgcagttgccatattcctgattcgcctccgtcatctcggaacagaaattggcaattccggccgctgcgggatgatgtatttgcccgacatagcttttatggttattataagccgcgctctccagccctccctctccttgaaaagactggaatgcactccccctatttatattgccctcgtatcttctggtcaacggtatccagcgcatgtgcgatctgggctacgtgctctccgtctctttggactatttcattgtatgagttcagacatccctgcatcgcctgataggtctgctcacattctatctgtgcaggtactcctgaggcggcggcgctgcccgcacccggcaaaataatattattgcctgccgagacgatattactccgcagagcaagagcgctgccgagtgatgatttaatatccatacatttctcctcctttcctgtcaacagtctgttctttccaccgcccttggcagcagaagttctttataggtaccgttatggaacagcagcccttccgtaaatgccacatgatccgctcctgcagggatcggcatgatacccagaaacccctgagaactcaccataagcccgtctgctgccgatttcacaaacctggtcaactcatccgtcccttttaattttcccgtatggccggtgatgatcatcgtgataccggcgttacatgccctcctgagcatggccgctatttcaggtatagaatccgtctcatacgccggaaagttatccaggtcatcgataaaaatataatacggcggcatctcccgcagcgtctcccacggtgcaatgccaggggtactctccagactttctctctgctgcttctccctgctttccacctcctgctccagctcgtccatatatgcgatgaacgcttccagacctttgacatacctcacatcttttctcgcagcatagccaaacaaacccatatcagccgcgtcaaacagtacgacctcctctgttcctgcagtctgttcgatcagtatctttaacgcgttcgtcttgcccttgccgccctcgcccagtatgagaaagggactgcatagccgcgaaaatccgctgaggataacctttttcttctcgagtccaagatacagatctgcctcctctttttcataagcgcacatcatatccgcgctgaactcttccggaagtaccggtatatgctcggcctcttcccctgggtacatctccctgatgctcttaacaagcttcctgatgttgctcgtatactccgctgccttttcaaatacagccatagtgtatatctgaatcatattaacatcatcttctcgttttacaaatgccctccctcttatttccggcagtttatatttgcaccgccctacaacattcgtcacttcaccactttcaaaattataaccggcaagtttatttttaaaattattacacgtcgcggctcttaccgcatttattctggaagcggttataataaaataaattccgactcccgcgccgtctcttgtcaatcgggtaaaatattcttcctcatcaaatcccagctctttcacggcatcaaagttatctgccagcactacgaccgctctcatcttttcttctgacatctcattgtatacctgaaagttaggagccatgacagatgacagacgccttttcctgtaccgcacctcttcgctcatgagttccttgaatttgtcataccgttcagtgtcttctatacttatgtattcagatgtatgcggaagattcctcagcgagatcagagcgttattgccaaagtcgaggatatacaagttaagctcccgtacccggtatgacatggcaaggcttaaccccgcagtcgtcagaaataccgacttgccatatccgctggaagcaatatacataatgttgccgtcttccggcagattcagctcataaaccgtctgcctctgctcttttggcacatccatcagaccaatgggtatcacaatgctcccctcttccctctcatggcggccttctgctgccgcgagcggactgagcagttttttcccaagggatggaagccacggctttttgacttccgtatgtatttccccttcgtacacctccctgatatggcgtacggtcacatcaagctgtgtttcctttgctttcttttcagcacgggtaccgctcagatcacggttcaccaatacgccttgccccaattcattcatcagatagacacggtcatccatagtaatttcttcttcctgctcttcgatataatctgctccgctccaggcagactgaaacagttcatatatctcattgctgccgacctgcagataagctcttcccgcctgtgtaatacctgcggcatcaggtgtctttatgatctctttgctgtccgcttcattctgtaccttaagcgcaagcttaaatctggagtttgcccatatctgatcgtccaccacgccgcttggcttctgagtcgccagaataaggtggacgccaagacttcttccgatagccgctactgaaacgagttccttcataaattcaggctgtgctttcttaagctctgcaaattcatcgctgatcaaaaagagatgcggaagcggctccttaacttttccctctttgaacaggctgctgtatgcattgatgctgtttactccattgtctttaaaaatcctctgtcttcgttttagttctgcccggatggaagacatggctctcaggctttccgttccgtccagattcgttatcgtgccaagaagatgcggaaggtcacgaaacaggttcgccatacctccgcccttgtagtcaataatcaggaaccctacttcataaggatgaaaattaactgcaagcgataatatataagactgtatgacctctgacttgccggaacctgttgtccccgcgatcaaaccgtggggaccatgggctttctcgtggagattcagatatacgatgttatcctccgcccggactccaagcggtacagcaagcgacttgtgtgctcccccctcctgccaccttgagcggatatccaattcttctggtctacggacatgatacatctgaaagaacgttatgctgtccggaaggtggctcgttactccctggatatgcttcagaacgccaagatctctggccattgcctccagatcacacccttccagcctttgaagcgtgagcttgtcatcttttaattctttttcctcaaggagaagcctgcctgtcccggattgttccagaagcagcactgtttcgatattttcagggagattagcctgaagatagcttgtatatataatagaaaatcccaggtttttcccttctccctgcagatattccataatggagtgatctatgatcagtttaggctcatcaatgataaagagaaaatgcgggataaatctggattcttttttgctttcatccagtttcacctgtctctcttttaagatctgattcatactgttcagaatctggtctctgacacgctctgaatgaataagtccctgaacatttaatgactggatcttattgtgaggcagccagcgcatccagctgaattcctcctcatatctcccgtcatatacaacaacgatctgcaggtcatgataactttgaaacgcagcaagctggctgatatatattttcaactgttcatgaatagcagccttcgtccctaccaatccaagatgtgcttttttcaagtctacaacacattccttttcgatccaatcatagagtgccgcgatccgtgacgcttccttgtccagttcatccttattcatagcaagctcattatctttcgtcctcagcttaaatgccggcttctttatctgtcttcccactgtgatcgtaagaaaatcctcatctgagctgctccgctcatatatcctgctgctgtattggcgcaccatcttccggatctcaattaccggagggaaattataacggtacgcctcctcttcctgcctgtacagctcatatatttcctttcttttccgaagaagatactgttcatacagtttcctgcgcttcttatccgtctcttttctctcttttctgtcgctgataaaccttatgactgcgacaattactgtcatcccggtgcctcccacggacataagcagaaacataccacgccccatcagaagacctatgccgaccgtcactgccatcatcccaagcgggggaagaagtgtctgaagcagattagatctactcactccggtcttctggggaggcgcctgtatctcggcctcctcagacgcaatgcgtctgataatgcgcggggaacgtttataataaggaaatccatcaaacggcacttctggttcctgcagctcgggcagagaagaagtatacgccttgttgtcaccgatcactgcaatcttacgttcaaaaagaataacctttgtatggcggatcagcagtacgtctccttcttctaataaaaaggaattgtcccgtacacgcttcctgttgtgatagatcttctccttctccagatcacctattacatgtacttctcttccctcaatacacaactccagtctgcacttatctatgacaatgttcccgcagcgccctatgtacaggcaggtctctctggcaaatacttgcttttcatttttcagagagataacctgcccctcctgctttactttttcatactgtccgccttgcggatactcttcataccagtcatccttttccaccagattatagttcatactgctactcctcttctgtactcatgtcgtactgaatcccaagcttttccgcaagtttatctatctcgccatccagcgtctccattcttgctgccttttcgtctccctttaatgatgaatcccgggatacctggtcacgttcctgaagataagcatagagcagcagctggttgtcagacatcttaagagcgatatcttcggcttctttcgtctcaagacgtcccaggtatatccaataatccatcactgaagcgtcgcccttcacgttaagcctggacaaaatattatctttggcttcgctgctgaaattgtccaccgcctgcccctttatatatgatactgccagtatatacttttcatggacatccagcgcatccggctgaacctctttgagactgtcgataacagctacatagtccaactcaacataagcccgctgagctgtaagcgcggcccgctgcggagcgatcaacttatagtgctggtataacaaatacgccagtgccgctgctgcaagtacaagaaataatatcatacccgctttcattcccctgtacctgcttttcttaatcgtgcacaaatgtgttctctcataacttcttaaaccgcactgtctctggcttaagtctttgagcgcatcatccatactgttccactgcagtattcttctcgtctcttcctgtctgtcaagaagatccatcccaccgttaagataatcactgaaattatacttcttctgcagcaatgcccccgcaagcgcctgaaactctttaaaataatccttaaccgctccgtcttccaagatgtcacgtcttaacacatgtaaacgattctgtgcgtcataatataaattttccggttcaagggaaaagttaaaagccctggccttttcccccagctctcctgcctgaatcaaaatagtgtatatcagctcccggtcacttttctttacttccttcagcggagtcataccatccagctcataggtaaaacaaaggctttcttccttttcttctactttgcacggcacaaaataatatgtctcagcctgcagcctgtgataatcataggctgcagatgctttcatctgtgtcttatgtacagtctcttccaagacgattgtgccgccctttgttgtctcttcgttctttcccataatctctccttctgtatacagcactggccgataccctgcttccgtgccgtttatattctgcccagagtaatccggccttaggtcaccgctgatatattcttattttttttgctcttcgccgtaccactcactgtccataacttcatactccgttcccggagtaactgcatctataattactacaccatcttcctccctttttaccacttcacgtacatggcagtcctccggtgacactcccgtgaacacctgggcttccaataaacacccaaggataaccacactatccatgccccactccatagaagaaatcttgtatccctttttcaaggtatatgttacctttgtatggtctttattaatctttattttcatatccttatctttgttgttttctattcttgtgtttatcgcctcctctcttgtacttatccagtgttccaactgctttcttgtcaaagtcaaagtaagtgttccgtttccattatcttcaaccttttcaaaccacgaattgtcttcattccctttttctaattcctctatggatttctctatcggatcagttgaaaaccgatacgaattaactaaaaaaactggtagtataaattctttcgtctctccttctgggatttttatcttacgttctattcttacttcatctttcgacagttttgttttggccggccacagttccgctcctctttcatatgcgtattttacatatagcaatagcagtattaaggcagctaaactgataaagctaacggtcttttgtaactttttcatttcccaactccctgcaatgatcccatcagtgcccacaatccaccgatagtctatttatctttagttttttctccgtaccactcttcatctgttacctcaaaatatctattatccgtattcatatcaacaattgttttcccgtctgattctctttttattatttcacgcacataacagtcctccggcgccactccggtgaacacctgggcctctaataaacttcccaggatcacctgcgcatccatgccccattccatgaaggaaatctcaaatccttcttttaatatatatgttacttttgtatagtctttattaatctttattttcatatctttatttttgttgttttctattcttgtgtttatagcctcttctcctgtacttatccaatactccaactgctttcttgtcaaagtcaaagtaagtgttccgtctccattttcttcaaccttttcaaacaacatattgccttcattccctttttctaattcctctatggatttttctatcggatcagttgaaaaccgatacaaatcaactaaaaaaaccggtagtataaattctttcgtctctccttctgggatttttatcttacgttctattctcacttcatctttcgacagttttgttttggccggccataattccgctcctctttcatatgcgtattttacatatagcaatagcagtattaaggcagctaaactgataaagctaacggctctttttaacttttccaatttccttcccccttatcctattggtaccggcacgccacttggtagcggaaacaaaatccccgtagcttcaaaggttttccttggcgcatctgcaggttcaagttcataggcctccattttcctgtctgcgtttgtcgggcggtattccagaccaactttacttgttacacaatttatctcttcataggtcgtcgtggcgccccactcaatttttgctgacttcttttctctggaataactaatttctgtatatgctgttgacctatcatctaagtcatatgatcgctttacgctggtacctgtaatacccttcttaccctccagatttccaatcttcactccccactccgccagtatttccctgttcttggatatggccacttccacagattgaggattatccaggtttgtctctatacttttctctacccctccgtacagcactaatccgtcagccaatggaatttccatctcaccgtccagcagttgtaccgacagattcggaatatatttcccgataattctcgctatcttgtcggcgtattccaactgctcttttgcatcaagcgccatgaactcttcttcctcaagcagttcatctccgagctgctttttcaactcttttgatatgagtacggtctgccatttctcctcaatatccgcaaacagctgcaggtttaccggagctatggcatattggtttgaagccgcattatatcttaccccttgcatagccgacacggctgatgcaagagctttctgcatagtttgcgcccctgcgtatattcccgacgtagcagccagcatttcccctatcttttctatatttctcctgtactcttctataatctcataaagggtatccaattcctcccgatacgaataggcaatacgctggtagccgctgatatccatatgaacggaaaaggaacggccatttccgagtatgctccttatcgtttccatgataaagctcagacaggaattcagttggtcatactgtactttcagcgcctcatattcacttctccacttatcttcgtcaactactgttcccgccgaaaaatactggcagagacaattgctgtaattctggtttgcctctgtcatctccaaacagaaattaaaaattccgccggccaccggctggtgcatcaggccgacatagcttttatggttattataagccgtgctttccagtcctccatcgtcttgaaaagactggaaggctcttccaagtgtatcgcttttcatccggacatccgccagatatccgttcatggtattgagttctgtcagaacagaatctatattaatctttacacccattttactctcctttcccgataacgctgtataacttattatcggtcattcacaggacggtcaatatatctccgtgacgtatttccgcctgcttaaatgtcaggtacggattcacgtatgtcttctgccgccacgacctgacggacatcccttccgccggctctgtaatcgcaagcgcgccgttatcgttcaaaatatccagcacatcccggattctctgttctggtttcacactgacatctattttcactttattgtccgccgtacatatcgttaatattatcaatcctgcgtttcctctctcttctcaactttcccgcatataaatacccagctgccagcgcggccgccacgaatatttctatccagaataatccgtccggcccggcgccggatacctctttctcattcttactgccggtgttttccgctgtttccgaaaataccaggctgcggataacatccagtctctcttcaccgtcagacgtagttacaaacacctgctgtccgatatattttatgttatgtattttctcattttctaaggactgtatcttttcctgtgatctatcgtcaaatactggcacaccgtacagatcacagagagagattcccgtcgtactcttctgttctgtgatcaccgacgggttccattctatcgttgtatcttcccgctgagctttctctgtctgcatatagcctcccattgatattggaatgggagccggagcgcccggcccttggctccccctcttcttatcggccggaattggccgcgcttgccgcctgatccgcctcttcatagtaagttgcattctgctgcaggcctgtcccgatatcctggatcagatcctggatcgcctgaaagctcggcgctaattcctgatagcgggtaatgtatgcttccgctcctgccccctgccacagctccggcagcttgctgttcacgatcgtatccagaaatgagcgcagctccgtatactcctgcattgcctgacctgttatctgctgtgcctgtgtcttcacatcatcgctcttaattcctatgttcatagggctcctcctctctttgtctgatttataattagcatctgcggatgttaattatcctttttcttcttccgcatcaccgcggtgatggtaatatataaaatgacgccaaggacgatagctgcgccaagcgcctccagtacagctttaccggccgccgaggcatccttttcatcaccgccggccgaggcttcgtcgtcctcttccttactgtttactccggcattttctgtggcactgcgctctgtcacccagaagggatccacaataaaccggctcgcctccagattgtctgcttttcctatccttgtatatggcagtttacccgcgaagctattcataagttcctgattgctctggctgttctcctcttttactttctgcgctcccgcaaggccttgttcaaccgcgtcttcggaagctttggtcgcttcctgtatatgctgccgcaatgcgacctcattggcagtgtatgtctcatatacttttaccagattatccagacgttccgtatctctttcctgtacttccttctgcatggaacttgtgctgttatgcatgtctgagtaggattcctgtactgcgttccggtcaatatatccaagcggatcgtatgctgtcaatgaactttggaatgcagacagcttttcttctgattccgtgtaactgctatggaacgcatcgttcacttcatcagctctgttcagcagaggtgatatgacatcgctgccgatactgttcataatatcgcccagcttttcatcgctgaccggctcgatcttataatcctcatctgccgtcagatcagtctccgctgcggcaaggctgtccgcgagcagcctgtctgtctcttttctgttctcctgcgcgtccccttcggtaaaggctccatccccctctttcacgaaccgctctgcactgcagtttggcagcatacttaaaatgacagcctgtattcccgctttgtcctgaatatccgtcgctgcatctcccaccttataggcgccgccgctgttttgacggtaagccgtgagcagtttgtccaactctgcggtatctaaagtcccgcccgcaccgattagtgtataagttcttccgtccatcgtcacggatccgtcgaagaccgtccatgcaggcggtgatcccgctccatatgtgccgttgctaagaacaccggcaatatgatccgccgctgtctgaagaccatcgttatgttcctcaataccatgccgcactcctgaaaggtatctccccagctctcccagatttccctcgatgagattcattatgctttgtatattatctctgtggctctccagtacagtattgtaatctgcaagcagcctctttacgcttggcagtcccgggtcataaatattgttgccctctgtgtcctttgtcacgtccagcccctttatctgacggtttgtatcgtcgagagatccctttgcttctgttcccgcttctgtgagcttctgtcttccttcttcgcctctggccgcgcctgtttcatactcattttgtatctcgtctatcgctctcccatttctgaggatatattcttgtatgtccagggcagttatactcatgtccggctgtgacaactgtggaaattcaatatacgcctgcaggtcataggctttgatcttcagcagcaccgccgtgtctttcctgtcgttttccatcacccggacagcgctgtcctgcgcggtgtggaactcctccagaattccttccacatacagcagacttacattgtctgccatagactgtataaacgtattcacctgctttagtattgttatttttttctcctggacgagctgttcattgatctcaaatgttatattcgacttggacattaccgtattcaaactctcgacatccgctgagaatcctgccggtataacgatataagccccatattctcctgtgtatactccgtttctcgcatcttccagaccggcatatacatagctgccgccggaaagatggatcagatttgacgcataattgaccgttctgtctcccagtctcacaccctcatccagattcacaacggcgatcgcgctgctctcatctttcttcccggtgtctgctctttgtcccatactcactcttcctgccagaaaaccggccgccagcagcaaaaatgcagccgcagttattactatcgtccggatacctgtcttagttcccaaccagctttcctcctgttcctgctctttgtcattttcttaaccggcgataatattccggctgaaatagatttaccgcattatattattattttatgagattaatctgtaaagtcatagcgtttatccttaatcggtcggtgtctgtccttaactggtcggtcactatcatctaaattactatgtatactgcgtgatctccggcctgtttttcgactgtttgcggcattgatctgcaaattaatatattaactgttgtcgaatcgttaaaggcttgtcttaatttggctataatctataaattcaattgactttttctatagaaattgatacaattgaaacaagaacagacaatattttaacaaggaatatagtaaatcggggtacttgtattccagtttcaaggacatattgtttgtttattttaagttttagttactttttaaacaatctggagggatgaactatgaacgcaacaaccattttacgtattatcatcattgtgtatacagctatattcgccgtatactggattaaggactgtgtagcccacaaagaagaatttacgggtaaaaaagtaattccgttgttcatcattggcgctatcacaaacttccttgatacacttggtatcggaagtttcgcaactacacaggctggttttaaatttacgaaatcaagtcctgacgagacaatgcctggtacactgaatatcggtgacgctataccggtcgtaacagaatttgttcttttcctgacattaattgagatggatacattaactcttgtactgctgatcatcgcagcagttgtaggttcttacataggagccggtatcgtttccaagatgcctgttaagcagatccgtatcgctttgggtgctgcgcttattgctctcgctattatcatgggatgcagattactgtccgtaggaccattcggcgctgttggtacagctacaggcctcacaggcattaagttagttatcggtatcgtagttaacttcttccttggtgctttcatgacgatcggtgttggtctctacgctccttgtatggctatgatcggtgctttaggcatgaacatccaggctgctttcccagttatgatgggttcttgtgcattcctgatgcctgcatgtggtatcaaatttatcagagaaggaaagtatgacagaaaagcttccgtacttcttactgtaggtggtgtgatcggtgttcttatcgcttacttcctggtaaaatctatgcctatgacagttcttacatgggttgtaatcgttgtaatgatctacacagcgatcacattctttagagatgcttccaaaagctaattgaatatgacgatacagaaaaagccatccgatcggatggctttttcattttctctttttctctatttctttttttctgacttattctttctccgttcctcgatcttgcggtcctgttccgcctcagctgcttttctcatcttgttcatgagctgtatacgttctttcagaggcatctttaatggtatcactcctgttttcgtcttactctccaaaaatttctcaaatgcttcggcgtctcccatattgaagtctttaaatggcagaacatataattcttcattgttcattgctataaaataatttctgtcatccttgtagctgcctgatatctcaccatatttggcattattcacttcctgatattccgtattctctacatcaaatccgctttggccaaatacaaagtaaatatccgattgatttttataattatcatccaccgacgcaagttttgtaaacgcgatataccgcctcgttatcacaaagagaaggatcagcgcactgattatgccacaagaccaggatgctgacggtatatctctaaatgccacagtcaatatgataaagcagccggcaaacagacaaagtttaagacctgttcttggatttttcactttataagaaaactttatgaaatctttcagcacctcctctgtatgtttcgttgccactttatatataggtgtcatattctttctccctccggtttgttattgtcctttttcattatattatatttcacacgcaaccacaagagtcacttgacaaagtaagacattcttccataagtcttttctttactcttttagcacagtaaagtgcattaaattttgtttcaaaaacggtttataattgttaaattgcataaaaataaattttttgatttacttgtattgacacttaaatttataaatgatatatttatagcaacttaaatgtacgacgaccaatggcggttacctcggcaaggggactgcctattttttaaaaagtacaggtaagttaaaaccaatatggttgtaattgcagttaaactgctgccgaccatttcccccaagaatggtcctgcagcagcggactccaattgatatatacatcctctttagtaggagcattccccagctttgtatataaacaaaactgcaatgcaacgaggaaaaacctctcaatgacataccaaaaagaaagggcacgacataccgtatgtcgtgccttttctttaccgagaattacagttgggaagtgattgcataactatacaaattgcggaattattattaacacaacttgactataaaaaggaggagacactatggaagatgaaaaaaagaaaaaggcggcggctgccggagaaactgacgccactgctgcagacaatgacgaaaaactgtccggcacctgggctgccgacgcgcaggatgatcttgaggactggatcgaagagcaggggatccagctgcgttattagtatctgacgtcgagatcgttagaatcttgatataggcagacttaaaaggtgttattgcagaaagagcgggaatcagacaatgagatctgattcccgctctttctattgttacagcttcctgactgactattttcacgaagcgtctacctagattcatttttgcgcattttcagcttgagcagcgccgtcgcttttttacagtccagctctaccatgttgttttccccgacaacatttgtctctgtcccgtctgcgctcttgttgatatctacgatcccatccagataatcattcactacgacaaactgggctaccgttccgctgaagttaagtcctgtcactgcgataccgcgtgttccaagctgctcgcatgtgtttgtatagtcgacatcgctgttgccccatccgtccgatgatatgataactccgtctgcgcgcatcgcttctgcccacacggcagttcttgtgcccacaagcatcttatcctcattatcatccggtgttcccacgatgatgatccccatcagatccagatcggtatcattggatacgacatccagcaacgggtctctgaagtgatgtaatgatgtttcttttgttgatggtcctattcccatgatcacacctcctactgcatggaccggataattccgtctctgtactcgttaggtgtaacaagtaccggcatattacccatgtctatgattgaacgtccgccttcaactcctgaaggttctttcgcaaacaagtgtgtatcgtacatagcgccctgtccggcaacctgctttacgatcaggacacgttttttgcccggccttaccacgtcgtgatactcgtggcgttccgtacacttctcgcccttgaactttttcagtttatcgcggtatgtctgtataaacttatcgcacgcgcgatgggcggcggtcggtcccggcctctcctgtcccatgcctacggtaagtgtaacgtcaaaggaaattatgtaatcattgtcgcctggagtccctgcacggttcagatagagctgctctttcagctttccttctgaggagccaaactcatggcactgttttccattgacatccacacctgtaagcacgacatatacaccggttacagtgtgggtgatcccttctcccagctttccgagcacttttgtggaaataggtatgatatccatgatcgtatttgtccagcggtcatgatcgcccggcttgatgatctggatatcaattttctcaagatgctcttcttccgcggtcagtttatcaatcatttctttactgactgtcatatgaccgtcaaccgaaatatcattgtgctctccccactccacgtcattcatatgaaatgccttgatcacaagacgtctcaggtcttttacttcttcagccaacttaagtcacctccgatatttacgtctgttatcacattttgtttacaatatgccggattcttttccgatatattgtcatatcacttttcaaaaaagggcagatgcaaaacatctgcccttcgatccgaacctgcgttcactaaatcttagctacatattcgaatggcaacggaacaatctttcctggtgtctggatctcaactaactgctccagagttgccctaacgatctgtgtctgctgttcaacgttgtgcggtcctccggcattagcacccataggtaccaatggagcaactgcacgaggagtaccagtctgacgtacaactggtggaagagctgcaataataattgtaggaattccagcttcttcaatcgctctctgcaccaatactgcagagcggtggcaggtacctcagccagcggtgaggactactgcgtctacatcctcttctttgaacatctgtgcgatagccggaccagtttcacctttgaatttctcctggtttccgccgccgcccatgaatcctgcgtgtaccggagcacaagctctgataaatccttcagcagctaattcatgaattctgtcgatcgggaacatgcagttgatgtctttgttaacatcactgttgtcatatccgccgtgggataccatcaattcactagatggtgtagtgttctctatttttctccatgaaaagtctccggcaagattgaatctttcctgatcctttttatgaacaccagcagctgttgcaagagcgatagacatgtctttcagctcttttgttacaggagtccatactgatggcggagtaataggaacgaatatttcagattgtaaacctttaacaaccgttaaactcatttttaagcctccttattatccatacgttggcgcatttcttcttgtttgcgtcgttctttttcaatgttgctgatatatttgtcatttacttcttccccaagctgttccggaaaactcatgttccatccgacttcctggcctactttcagctcatagtcgcagataaacattcttttcggcgctttaaagaacccgaggcgtcctttcagatcgacgctgatgctgcaatcgtcgatatccacgatcacaccttccatataaatgactttatcaccataattcaaacgttcattgttcattcaactttacctgaattaactgtatttttctttacgcttctggctcatcggaagggcctgctcattttcaacaaggtcgatcttagcgcctgcggcagcttcaattaattcaacgtttgtagatttaacgtttggattccatttcttctcagcagctttaacatcttctcctgccatagcagctttcagcatagctaatgcacgaacagcatcctcctggcaaagggtattgttaccaagaatctcattctcgataccagcttctgatttgttattgtcaaccatgtagttcatgtacttgttaccaacaacaagcgcaccctgtactgcacagtaagacataccaacaaccggtgttcctctcataccaatctgctcgatatggcttgcgaagtcgatgtggttgtttccgaaaccttctgttgtaacgaaagctccgtctgcatccatagcttctactgtcataccaacacgtctggatacgtagaacttctcagcgttgatctgcgggcttccaacgaatacaacgccgcaaaggtcaacttccggatcatgaagagcttcaagaacgagcggctctctccagtaatgtctggacatctctttagatgcaggtccgatacatgtaagcgcatggatacatccgtcaagaacctccaacggagatacgcatacaggaacgtttcctaagtctacgttagctcttgcgccaagaacaccaacaggctctacaggaaggatgaagttatcatgcatagctccctggcccatgatctctttaacgataacgacttttttcttgcctggacggcgaacctgcttcagttcttccgtatcagctacaaggctctcgtcaagcttcttcataacttcacggatctcctgagtgataaggtcaaatgctgtatgtgcagccataggtccacggcgttccatgttcgtcttgtcctgaatcacgatgttacctttgataaagatctcgcctttatccgggcagctcggacggttccacatgatgttctcatcaaggtatccttcagaagaaccgaattcaccgatctgaactccgccttcgtcaacacctgtcagcatcataacaacgccgtcaagaactcttgtaacgccttcgccgactgcatcatcgccttcttttgtagcgattggctgaacgtccatgatcgtctcagaatatgtgtgatataaatcaggtgtgatgacttcaagtttgaaatctttaaccagttcctgatcagcaataacatctgcttcaattccttcacggatgtaaagagttgttccctcgatctttgtctctggtcctctcttaacttctgtgatagtgaagtgttttcttgttaagcttcttactactttttcttccccagctgcttccggtgctgctgcgcctgctgcaactgcttctgcgcctgccggcaatggagcgactgctgcgccgccgccaagagctcctaccgggatctcaaggtcgatatctttaccttctccaatgtggatttttaatgttccgcctgctgccggtcctgctacaggtggtgcaaccggtgccggagctgccggagcttcctctgcaggtgcttcctctgctgccggagcacttggagcctttgcaccttctactacatctgctgtaagcgggcaaagtgaatcacaagtttttgtaagttttgctcctaaaacttgttcgatggtcaatgcaccatccaggttcagtaatcctgagtctaccaaatcatcaaagatcgccggatcttcaagattagcagcttcgattgtaacgcctgcttcggctctacaacataatacggcaggatcatgagcatgttctttagctgtttcagctgtgattgacatatttgtttccctccttgtttggttttgcttaagtatccattctgggcacttatttaaattatatatacagccgcatatgatacacggaatacctctcgacttccgcccgcaaaagaatcgggggtcttttacagttcatcatctgcgacagtaataccgttgtctgcagacttatttcccgttggggagctggtctacttctttagaaactgtgagtctcctgtataacggatgaccgatcgttctcatgacgtggtctgtctgatggaatgttttcagtttcagcttcggcgcagatcccataactgtgttagagcagtctgagcagttgccgatgatgatgaattccgctccgtctttcttgaactggagacacttctgtgcctggccaggacagttaccaggattttcgcacttaagcgctgctcccggcttaggttcgatcgcctgcttacatcttgccacagaaacaacctttccattcatcttttcacagatttcacgcatgcggtcttcgctgccgccgcaggcacataccaacagacccacgttagcgccgtgtaaatccggaaattcaactgttacgatgatgccgcctgtcgtctttgtaacaggagcctctaatgtagtggactttcctgtaaatggtccgcccataatgatctcgccatatgtaccgtcaattccgccggccttctcgatcatatcgcctacgcttgttccaaccggaacgtccataaatacgtgtggctcattgccgccgttcagcttgccgataactgtcatattcttgctgtagcaaggtttcttaagttcgatcgcctcagcgatgcgaagcagtgtctcgcagttgatcacgactgcgtctgccgctgaaggaagctgtgtaggatccagaagcttgccaagcgcctctcttacgaccgctctttcctctcccatcgggtagatatcgggaagaagatggatcgtaatgctgtcttcctctttgatcgcttctcttaatatctgtattgccttctcatttttcttcttgatggcaatgatacctttagacgcgttacagacttccatgcagtatttcagcccgcggatcgtaatatcagtctgctcctcgatctgctgaatattgtggcgaagtcccggctcgcattctgctgcattcaccaacacatatccgcctttaaggtctgttccgatcttgactcctgtcgggaatccggcgccgcccataccaacgattccagcttcttttaccatctcgagctttgttccttctttaataggtacaaactcgtctttctgctcttcatcaggcttgatgataatacgatcatccgccacttcttccactacaccgtacacactggaaaaaatgttagcgccaagacctgtaggtgttgcaatcaaggtacctttttttacttcatccccagcctttacgattgcctcacagggtgcaccaacatgttgacgtaataaaatctgcacatttcccatgacatctttctcctttattttgtttttttataagtaaaaaacgaaacttacatcccgtttacttattacatgtccatgacataccattttgttttatttataaattttatctataaattacaatatattgttatcgctatttttttaacactatatatatcttttttggcggaggcatgtgggaatcgaacccacccaggacgctcttaacgccccacactagttttgaagactaggaggcacaccagtcacccatctacccccatggttcttgcctcatgcgtcttgactataacacaattttttgcatatttcaaccgtttttatttactttttatattaccaaaaaatcattgacttttcaaggtttatcgtacataataattgtagcagactgaacgtgatactagaatacggtctaattgttaattttatatcgtaataacatacgattttgaggtttttccgaaaaaggcaccgcggagacaagggaatctccaacgtgtttttataaaaacttatagtaattgtctatgagtaaacatttaaggaggtaatgaattatggagttaaaagcaaatgttaacttcgatcggtttgagcaggcattacaggtagttgacgctcataccgtcggcgagttctgccgtgtagtcattggaggatttccggagccggaaggcagcacaatgatcgaaaagaaaaaatggatggagaacaattatgaccatgttcgtacagcattgatgttcgaaccaagaggacatcacgacatgtttggggcattcctgtgcgagccagtcaacaaagaagctgactttggcgtaatgttcatggacacaggcggatatcttaacatgtgcggccactgtacgatcggcgctgtaactgttgcagttgaagcaggacttgtagagtccaaagaaggtgtgaacgaagttgttctcgaagcacctgcaggtctcatccgtacagaagcagttgtaaaagacggtaaagttgagcacgttacactgacaaacgtaccggctttcgtttataaagaaaacctctccgttacgatcgacggaaaagagattccatttacgatctcattcggcggaagcttctttgctttggttgacacaacgaagatcggcattgaggagatcagcccgaagactgttcctgacatcacaaaattaggaatgaaacttctggatgttatcaataaagagattcctgtaaaacatcctcttcttgacattgataccgttgatttggttgagttctacggaccgacaccaaacccggacaaagcaacgatgagaaatgtcgtgatcttcggagatgctatggctgaccgctcaccatgcggaacaggaacaagcgctaagctcgctactcttcatcactggggagagatcggcgtaggcgaggaattcatctacgaaagctttatcggtactacatttaagggcgttatcaaagagacgacaaaggttgccgattacgatgcagttatcccgatgatcacaggaagctgctatctgacaggcgttgctacatatttgatcgatcctacagatccattgaaatatggtttccaggtaggctaatcatctgccggaaccgaagttggtagtgcgatagttatagaagcggattagttcataatccgcttctctttatataaaaggttataaaataggttaactagagaagggaatggggccgatgccacgaaagcgacaatccacgaaaagccgcatcgtaaaggctgcctggaacctgttctataagaacgggtacgagcagacgaccgtagaggatatcatatatgcttcaaagacctctaaaggtaccttctaccactatttcaaagggaaagaagccctgcttaattccctttcctatctgtttgacgaaaaatacgaagaactgactgcagtgatagacccgaacctgtccgcttatgataagctcctgtttttaaatcacgagctgttttatatgatagagacaagtgtagatatcaaactgcttgcgcttctgtattcttcccagcttgtcacaaaggataaaaaatcactttctgacagcaaacgcttctatttcaaatggatcactgaaattctggaagaaggtctggaaaaaggggaatttaaaaatacaagcactgccgaagaactcatggctatatacgccatgtttgagcgcgcgctgctgtatgactggtcgcttttcaagggaaaatactcactttcccaatacagcgacaaacttctgccgcatgtgctcgacacattcgtaaacggcgtatagataaacatagacagatgaacgcacaggcccggcggtacaggaaagtttcctgtaccgccgggcctgttttatcaaagaatcagactgatcacaccatacactcgtgcatatcttcttcttcgatccgggcctttgccatcatcgctttgatctgttccctttcggtaagatccgcacaccaggataagccgcatcctgctgatatcgcccttgggaccggaatgatccgtcccgggacgccgttttccttgcatgctttttccattgccatcgcgtcggccgttgtgtggaatgtaaccaccagttttaattctttttttctcatgtctattcgatcaccacttcaaaaaatccttctctttccgttgacaccgcagactttccatgctctttcgcatatttttctacgttcatcttctgatgtggttccgtgacaagaaccttcaccgcctctttggcgtctttaagtgcgtctgccgtcagcatgagcggctccgggcaggaaagacctcttgcatctacttctttcatattatttgaccttctttctcagaatactactaatgtgcctgtatttcaatattaaaacacaattattttgcttcttcccgcttgtttgtaaacgcgatgataaagcatgcggcaatgcatataatacatgccatttttccgtaaaacggaaccgctcccgcaacggtctctcccgtctctgcattgactgccgtgccgcttgctgcaaggccaaagttatgacagatcgctgcgccgacaagcataccgatcactgtgacagcggaatcagaggatccctgccccgccaggatgagctggcgcagaggacagcctcctgcgagcactgccgcaaacccaaccgcatacattccgagaatattccataaatgctctgaatgagcgataattccaggcgtatcaaaaccaaacacaaaacgtcccgtcgcaatgttgaatatgagcatgactgcaaacagccctgcgatcacactgaataagtcaaaattcttcatcaggatgatatcgcggatacttcccgcaaagcacatcctggacttctgggcaaacgcgccgaaaacgagaccgccgatcaaagaggcgatcaacggcgcatgcatacttcccggacccgtcacactcgctttcagcagtgatgtcccgacagagaggataagtatgccaagcatgatgacaggaagaaccgtgccggccgccttatttgtaacgtgcgcccttccgagactgaatcccttctttaaagcgacgactccggagccaacgcctagaataaatcctatcagggctacccatgcgttaagatcccccgcggacatacgaatcaccatacggagagggcagccgagaaatacaagggaacctatcataatgataagaccaagtacaaaccgtgtcatcggcgaagaacccgctgttgaacggtactcctttgtcgctgctgaaatgataaatgcgccgagtacaagtccgataatttccggtcttgcatactggacagcctctgcctggtgcattccgagcgcgcctgccgtgtctctgataaagcaggcaatacaaaatgccatgttggccggattgccgaagtaagccagacatgccgccacaagtccgcacactactcccgcaagtgcaagttttttctttgaatctgataaattcatgtttctcctcctttagtaactctcattcggctcaggctttcccgtcaccccgggtcagtctgccgccaattcccggatagccgcaatagcggtatccacttcttcatccgtgttatagtgggaaaagctgaatctgacagccccctgctccaccgtaccgagcgcctcatgcatcaatggagcacaatgcccccctggccttgttgaaattccatatgttgtaagaagctcatcactcacttctgaagaatcataatcaccgatattgagcgccacgatcgcgcagcgctcttttgcactgtaatcgccatatacctttacatccgggatatcttttacaccgtcgtagaatctccgcatcagttcctgctcgcgtctgcgtatgttgtcgatcccctctttttccagataagcaagcgccgcattcagacccgcgatcccgtgtccgttcagcgtgcccgcctccagggctgtcggcatctctgccggatgcgtcctgctgaaggtgcgcactccgcttccgccgctcttcagtggacggaccgccagcccttcccttacatacatgccgccggtcccctgcggacccaacagccctttatgtcccgtaaagcacaggacgtcgatcttcatctcctgcacgtcgatcgggaatacgcctgctgtctgtgaggcgtccacgacaaacaggacgttgtgtttcctggcgatatcgcctattggctttaagtctatataattgccggtgagattggatccgtttgttatgacgatcaattttgtatccgggcgtactgcggactcgatatcctccggctccaccgtgccgagactgctgcttttcacaattgtaagctccgtcccctgttcctccaactcatacagcggacgaagtacggaattgtgctccagcatcgtcgtcaccacatggtctccgggatttaaaagtcctttaagggccacgttcaggctttccgtcgagttggcggtgaagacgatctgcctcgggtcctctgcgtgaaacagagtacataatttttctcttgtgtcatatatgatcctcgatgcgctcaaagatgcctcattggcgcctcttcccgcatttcccattgaactcatcgcatttagtaccgcgtccagcacttccttcggtttctgcatggtagtcgctgcattatccatgtatatcatacgtacgtacatcctttcaaaataaaatttccttctgctacaattaagtatattaccaattatttccttcgtctaatcaaaaagccccataaaaaacaccagttatagaaattctctataattggtgctttattacttatttcccctgatatatagattttaccactctgataaaccgttccgccgaacgcgacagctgataatttttattatatacaaggttgatattgcggccttcgtccgcataagggatcgggaatacgagcagatgtccgtccgcagcctcatctgccgtcgcaagcctggacagtatagatatgcccatcccctggcgcacagacttcttgatcgtctcctgattctcaatacttgcgataatatccagatctgacagttccacaccgatgcgccgaagctgcttgcccgcctccttgcgcgttcccgagccttcctcacgcatgatgacgtgttccttcctgatccatgagatgtcgtctccgccttcttcttttatctgtctgtatttctctgtgttcggcgctattatgacaagttcgtctttgtaaaacggtatatatttgcagtgctttttctccagcacggttcccgtaaagcctacctctgccagatggtccacgatctgggctatgaccttgctgctgtccgtctcgatcagtttcagctgttcttccggatatttctcgctgaattttatgagcaccttcgggagaagatactgagacgggatcgtggacgccgcaatggtgatgcactgtctcttttccttccgggaggaaccgaatttttcctctatctggctctccaggtctatcatctgtctggcgtatttatacagctccctgccgtcgtcagacaggctcacttcctttgtgttccttacgaacagacgtacattcagttccttctccagggaagatatatgcgcgctgaccgtgggctgcgtcaagtacaattcttttgccgccttggaaaaactcccgccttctgccacttgtacaaaggcctctaactgttttaaattcattagtatgctaccctctcactctctgctcctgtcttctttgtcaccctgatattgtccatgtactccaggatcggcttggcgctttttctgctcgtaccgaatagatcgcgcacttccgctatcgtaatgacaggatgttccgcaagcttaccgctgatgatctctctggcctcatccatataagacttcatcgtatacatgtcatctgcgacttttacaacctgctcttcctcaagcagtatgttcaggatatcgtctgccgtctcccgtcctgtccccttcatatcgatctctgagtaacgtacgaaatcatatcctgccgttttgaatgcaccgagcagaaggccggccgtcttgtcataggtctcgtcccggcagatctcaaactccggtgtacagagaaattcatccacccgcttgatctgcccatccgccgtcaaacgctctaccgccttatcaaatacattcggcttcatcttctggaaataggtcatctggacttctgcttttttcattccataacggtatggatacttttcttcatacgatgacaacgcctttgtgatcttcccggcagcctcgcggcaggcatccgcatgccacacatacgtatcctttctcatggcgaacgtatacactgtgccgcctgcttccagctccttaacatcttcctgtacttcttccatggaaagggcagtaagcctggccagctccgcaagtgttatcatcgacgcgccgtactcttttacgtgaagttctatcacatctgtggatgaaccggattcttttcttcttaattcctcaatggcatcctcccggaagcgcttcttcacaccgggatttggttccagtacgacacctcccccgatcgtctccatcggggaatagaaacgcacgacgaacttgtcgccccgccgcaccgcgatcttctcctccagccgaagctgcacatatccgctctctcccggccctatctcatcggcatcgaggaggacggcgcggcagagcacctcactcgtgcctgtgaacagatggagtctggcgtgatgggtcagcacacgcatggacgattccagcacatcgagacgcacatccaaaaggtccgtttccttcatgctgtcagggggcgcaagcacacaccctctctttatctcccgcttctttacattggacaggttaatggcgacgcgctggccggcaaagcattcctttacatccctgccatgtacctggatgcttctgatcttgcacggctttccgaccggatacatctccagcgtatcttctttcgtgatcgttccggatacaagtgttccggttatgaccgtaccgaagcctgacagcgtaaacgcacggtcgatcggcaggcgcgcaatggtgtgaatgtcctttggcactacttcatcccgcgtcatctgctctatgatgctgataagctcgggcaggccatcccctgttgccgcagacaccttcgccacaggagcatgttccagaaaggtgccggcaagctcctctctgatctcttcttccacaagctccagccattcttcatccacaaggtcgcatttgttcagaacgataatactgttttcaatgccgagcagctgcagtatgtccacatgctcccgcgtctgaggcatgatcccctcatctgccgccacaacaagcagaacgagatccatgccgacaacgccggccaccatgttattgataaacttctcgtgtcccggtacatctatgatcccggcacggtctccgcccggaaggtcaaaataggtgaatccgaggtcgatcgttattccccttctctgctcttcctcccacctgtctgtgttccggccggtcagagccttgatcaatgtcgtctttccatggtcaatatgacccgcagtccctataataatgttcttcataaactctctgctccttaccgtgatgcgatcaggcttgtctcttccagcacatccagttcttttatctgctctgtgatcagcttaaactctctccttaaaagggtgcggacgtccaggaggaccgtgtcgtttactgttcttggaatgaccggcaccggcagatgtctgagacgttcctcaaattcaggcacgctgatcttctccgggcggatggccactgccatgcttggtatccgctccagcggaagcgaaccgccgccgatctgagattcacacggttctgtcctgatctgcgccggcagaccggccgcttccagcaggccggcaagttcccgcgcctcttccgtcacttcctccagcggctttgtgatcatccgcagaaccggaatatgctccactgctttttcctctgaaagatactcctgaagaaccagctccagtgtggccgccgtaaacttatcaatacggagcgcgcgggtgagctgattctttttcatcttgtcaatatatttcttcctgccgatgatgatgcccgcctggggtccgccgagcagcttgtcgccactgaagcacactacatccgcgcctttttggatagaatcctgaacggtcggctcataggtcagtccatacttgctcaagtcgataagtacgccgcttcccaggtcttctatcacggggatgtcatgctttttagcaatcgggacaagctcatcgaccgccaccgtatctgtgaagccaacgatgcggtaattgctcgtgtgcaccttgagaagcgcctttgtctcctctgtcactgcattttcgtagtcgtcataatgggtcttgttcgtcgtccccacttccaccagcgcggctccgctctgctccattacgtcggggatgcggaatttcccgccgatctcgaccagctccccgcgggagacgatcacctccccgccctttgcaagcgagctcaggatcagcatgaccgccgccgcattattatttaccgccatggcggcctcggctcctgtgatcttacacaataacttttcaaaatgagaataacgctcgccgcggcggccctcctccagattgtactccagattggaataaccggtcgctatggctgccacgttcttcatatgttccccgctgatgggggctctgcccagattcgtgtggaggatagtccccgtcccgttgaccaccatgcgcatattcggacggtgcatggccgccaccgtcatctcaatatgggccgtcagcatctccgtctgcgcccttgcggcctcctcgtcgtcgcattggccgataaacgcacggagcttgtccgtctcaatacgaatcgcttccatcaccgtatccctgctgtatagttcaatcatcccccggacagccttgctctccagaagcacatccaccttgggaatactgcggtacaacatatttttatccataacacttttcccttccaaattgtttgaattgtgtgtaaatcttcaaaggggtcagacccctatgctcataggggtctgaccccttttaaaacaacctgattaatctgtcacttttatcagttaccctcccgataactgacactttcgtgtccatctctgcctgtccgaactcccgcatcatagacgccagatcctccttgggcacgctgatgagcaggccgcccgaagtctgcggatcgtacaggaggtcgagataatactcctgcacgcagcctgcgtctactttatctatagaatatccgcggttcttatacgctcccgccgggatcagacccatcttcgcgtaatcggcggcatcttcaaaataggcaatatcctgcacattcagctcaaaggtgacgccgcttgcggatgccatctccacacagtggccaagaaggccaaatcccgtgatatctgtgcatgcggacacatcatagcgctccactacctgttttgcttttttgttcagtgatgccatcactgtctgtgcctccctgaccgcggacgcggacgccatctctgccttgatggctgtattgacgatcccgcttccgatctgtttcgtcagcacaaggacatctcccggcctgcagccgtaattcttaaatatcttatccggatgtacaaatccagacacgcacagtccgtacttcggctcatcatcctgaacagaatgaccgcccacaagcacggcgccggcttcttttactttcgcggcgcctccggccagtatatcccccagtatccccgggtccagacagtttggaaacccgacgatattgagcgccaccgcgggttctcctcccatggcccacacgtcgcttaacgagtttgccgcagcgatctgcccgaacatgtaagggtcatccactatgggcgtaaagaaatcgacggtctggatcatggcaatatcatctgtcaccttatagatagccgcatcatctgacgtctcaatacctactattaaattttcatcttcaaacttcggcagcttacccagcacctgggcaagggtctccggaccgatcttggccgctcacccagcagtcttgctcagctgcgtcaatcttacatctgacttcatatgcctgaaatcctcctgtctctttctcatcttctgtcaaaggcatgtcccccgcagcaaactacggcttgatcaccttggaagcacccgccatcgtttccacaatgctgtacatattcgtcactgtcccgaccgcaagcttctccttcagaccatagtaatcaagacatgtcccgcatgtcatgatctccactccctgagattccagcagcttcagatcctccagagaatccgacccttccgccgtaagtgtggccccgccgttgtagaacagcatcgctttcggcagaacgtcaagctgagtcaccgcgtaaatgaatcctttgatgagcactttccccagctcatcgttgccagcccccatccggtctgatgaaacggcgatcaccatactgccggcttcctgtttctcttccccaggagcgccttccatcttcactgtgatcttatattcaccgtcggagatctgttcagaagatacctctcccccttcgctctccgccatcttcgttacattctgcactgcgatctcattgtctaccagaacctcgatcgtctccggccctgcaagtgcctgtattgcctttttcgtcttgatgaccgggatcgggcaattttctcccatagcattcactgtgatcataattcttccacctttccagtaatctcatgttcccatcacctggcacttatagatatattctatcattgatgccttaaaaggtaaatgggtatttcttaatttatcttgtataatattgcgggagaagacttctctccagcccggcaatatgatactgtccatcctggtaatatgccggctttaaaccgcccttcttaaaaacgttcaggaattcttcttccgtctttacctcctccggaaagtatgtggcgcacacgccgaccttttccggcacatgacagtcgctggcgccgagcgtaatgagtccaagccgtttcgcatagagcgccgcctttgcgcacgcctcttttgatgtactgccgttcagcacctctatgccgtccagacccttcaccttcagaagattctcttccagccccctgttgttattccgaaacggatgggcggcatagcagactccgccctgggccttcaccagatcaataaattcctgggccggcacgcgttccttcggatattccctgatcccgaacgccacgatatccccctccagagagtagtattctatccccgtaaaaattggaaatgccgtttttgccgcgtattcccgggcataatcccgaattcccatactgtcatggtctgtgatgcagatgcctcccagccctttttctctccctctctccaccatctcgcgcagagtgaggatactgtcttttgaataggtcatctcatgcatatgtgtatcaataaacatgctgttcactcccgtccgcttaaagcaatataaaagtatacctatgtatattatataaaccttccgcccgcccatcaaatagaccttttttataataacgccttattatagataatatctatatagtgattttatggacattctgtgatatacttgtcccatacatccgcggaaacgggcgtccctgccctgttttgcgcaaatattgaggaatacgtacagaaaggaattcaacatatatgtggatcgcagaccaatggaaagattatgaagtattagattgcagcagaggtgaaaagctggagcgctggggacgctatattcttgtccgtccggatccgcaggtcatctgggacactccgaaggagaacagcggctggaacaataaaaacggccactatcaccgcagtaaaaaaggcggcggagaatgggaattcttccacctgcccgaacagtggcagatccattacaaagagctgaccttcaacctgaagcccttcagcttcaaacataccgggctttttccggaacaggccgccaactgggactggttttccgataagataaagcatgccggacgtcctgtgaaagtattgaatctcttcgcctacaccggcggcgccaccctggccgccgccgcggcgggcgcgagcgtcacccacgtagacgcctcaaagggcatggtggcatgggcaaaggaaaacgctgcctcttccggactctcggaccggccggtccgctggcttgtggacgactgtgtcaagtttgtggagcgggagatccgccggggaagcaaatacgacgccgttattatggatcccccgtcttacggacgcggtccaaaaggtgagatatggaagatcgaggacgccatccactcgctcatccgattatgcacgcgcatcctttccgacaacccgcttttcttcctcgtcaattcctatacgacaggactcgctcccgccgtgctcacctacatgctcggcacagaattaaaaaaatacaacggccgtgtagattcccaggagatcggacttcctgtcacagactcaggactcgtccttccgtgcggcgcttccggccgctttgaggcatagaacagaaccaagaagccggcagaaaagaagagacaggcgcaccttaaggtgtcctgtctctgtttaattcttccaatattgccggaacatcatgaagtgtatcaacgatcttatatgtaagacttctcagctcttcgtccggtctgacaagatccggcaccatcaccggcaccatctccgccgcatgggcagaccgtatgccgttaggcgaatcctccagcgccatgcaccgcccgggagcagtcccaatactctggcacgccgccagatatatctccgggtccggcttggccctgctcaccatatccccgaatacaaacccgtcaaaatattctttgattgccgcgtccgtcagattgcgcagcgcgtattcccctctcgacgaagtcgccagcgcggtcttaagcccatggtcccgcgcgtatgtaagcagctctttcactcccggcttcatgggcagtccttcttcatctgtgatctcacgaaagcgcacccttgtaagtgccgcaaactcttcgtgaggaaagtcggctccgacttcccgggtaaagtataccctgcgcgcggcagcattcatgccgagcgtattatatatgtggctccccatcccgggtaagccgagcacatttccgcagtcctcccacgagcgctggacgatacgctccgagtcaaacagcaggccgtccatatcaaatataagtgcatctatcatctcttaaaattcaattcctttcccgagagcatccttcagatagtcggacaccgcctccagtttgttgatgatctcctgtttctcctcccactcatcgccgcgcatatctttggcggcaaggcatctctggatatgcttcacttctcttatcaattcttccgtcataatcataaccccctttgctgccatactgtaattcatacttaccagaccagacagatcattaagtatagtagtattatatcacactataaacatctgtgacaaacatataagccgcacagcatacttatcgttctgacggcactgcggacggtatacatatagaaccgcggccggcgcgtatgatatacttattgaattattgttattcgatacggtatacttaaggtatcactaagaaaagaggtcagcgcactatgaaagaaataaaacggatcccactggaagggcttttcaacacacgtgatctcggcggcatcgccacagaagacggccgccgcatcagaccgcacaggctcataagaagcggcatgctccgagacatgaccggacaggacgaaaagactctggccgggacatatggattaaaaacgatcatagatttccggaccgcagacgaacaggcagaaagcccggacccgtccatccccggagtacggcacataagcaatccgatactggaggatatgacagccggcattacccacgatgaggaatccgacagacagctctcgctcggggaggcgaccgtcagtatgagagagcggggcatagaccctgcgtcttacatgcggcagatgtacgaggagatcatcacgagtgaatattctctgaaccagtaccgcagcttctttgatatcctcgcctcacagacggcaggagcggccctgtggcactgcagcgccggcaaggaccgggtcggcatcggcacggccatgcttctctatacactcggcgcagatatggacacgatcatgaaagattatatgatgaccggctcctttctccaggaagagaccgaccgtatcatcagccgtctctcccaccgtatcacagacccgtcggcgctggaaagcatacgcatatgcatgggcgtaaaagaagattatcttgaaagtgtcttctccatcatgaagaaaacatccggcagtatccgcgcgtttctggaatataacgtcggcctggaccgtgagaaaacggacagattaaaggcactgtaccttcagtgacagtgcccttgcagtatttttatatgtttttgcagaatacatagcggggcagacctccgtacttctcgtcttccgccacaatgtcatagccaagcttcaggaaattatttacgctgtaaatgttgtccgggtgggctgtccccatcagatatctgtattctgtctctgccagcagcttttccccgctgtccataagaagcttctgtatcccccgcccccggtagccgggaacgaccgcggcggactccatatgcgcgaccgtcatggcctgctctttcgtaagtcttatgtaactccccagattatcctccgcgcttttcggataacggataatgagaaaccctgccatcgtcccgtctgtgaccgcctttaacgtaatcccttcctcttccacgtgccgttccagaaaagaaatattatcaatgacgtaccagtccttatcacgggccagcttttcggaatcttccatgattctccgtatggcagggacatctccgtacccggcccgttcaacaaacattctcttactcataaatcctccctctttacggccgccggcaggtagtaaacaaccgccggctgtgttatgataaaatatgcaaaaatcatatggaaaggaacatatatattatgaaattaatgatcgcgtctgatattcacggttctgcacactactgccggaaaatgacagaggcataccgcagggaacaggcggaccgccttctgctgctcggcgatattctgtaccacggcccccgcaatgacctgccggaaaattatgatccgaaggaagtcattgccctgctgaatccgctcaaaaacgaacttctctgcgtccggggcaattgcgacactgaagtggaccagatggtcctcgattttcctattctggccgactactgcctgctcgaactggacgggcagacgatcttcgccacacatggccatcactggaacccgcagacaccgccgcctctcaaagagggggacatcctgttaaacggtcatacccacgttccggcccacgagaatatgggcacatatacgtatatgaatccgggttctgtctcgatccccaaagaaaactctgcgagaggttacatgctgtatgacaaaaaatttctgtggaaagacctggacggcgccgtattaaatatatagacagcctataatccggtctcctttttcacacgtttccggtatatgagtctcagccggccgacaagcagcgtcaagtagcgcagcaccggctccgtcgcgatagagaatacgacaaagagcatgatacactccacagacattcccgtgatggcaaaaagatccggaaggaaaatgctgcacgccagaagcccggccatactcccgatccagacgatgatccgcagtgtattgagcggctggcatatcttgaacagtatcataaaaccgacgatggcaagcagcatcgtggctgcggtggaaatatcggtcggactcacatcaaaggtcctgccgaacacaacgagcgccccgacggcaagaacatccgtcagcccggccggaagcgccttcagaaatacattcgtcaggaaatgacccttgatcacttcctggtttggctgcagcgccaggaagaatgccgggattcctatggtaaacatactgatgagcgatatctgcgacggctccagcggataggttatcataaaggcgaccgcgaacaaggacagcaggaaggaaaatatattcttcacgaggaagagactcgccgagcgctggatattgttgacaactctgcggccttccagcacaacggacggcatgcaggaaaaatcagattccagcagcacgacctgggaagcctgcaccgcagcgtcgcttccggacgccatggcgacgctgcagtccgcgtccttcagcgccagcacgtcgttgacaccgtcacctgtcatggctaccgtatgcccctgctctttcagcgcctgcacgaactgccttttctgcgccggcgtcacgcggccgaacactgtgtatttcgctatggcttccgccgcgtcttcttctgtcgcaagcacagcggcgtccacataattttccgcgtttttgatcccggcctccttcgccacctcagacacagtgagcgggttgtcaccggagatgaccttcacttccactccctgctctgcaaaataagcaaacgtctcgggcgcattctttctcaccggattcgccagcagtatataggcgagcggctcagcctttccggtcagtgcatttccgtcgatctcgccgtcataaccggcaaagacgagcacccggtaacctttcccggcatattgctgtatttcgtctttatacgtctcataatcttcccgcaggataaactccggcgcgccgagcacatgcgccttgtcctcataggtcaccccgctgtactttgtcttcgatgtaaacggcgtgaccttgaccggttttgcgtccgtgtgctccttaaaatacaccttcagcgcttccatcgtgctgttgtcactgctcatggcgagcgcaagatcgcctatcatccgggaaagtacggtctctgcatcctccccggtatttttttctgcctcttccgtctttttctctccggccgtcacaggaatgagcttctttacactcatggaattctccgtgatcgttccggtcttgtccacacagagcacgtccactctcgccagcgtctcaatgctcttcatatcatgcagcagcaccttctgcttcgccagacgcatggaactgaccgcaagcgccacacttgcaagaagataaaggccttccggtatcattccgatcacagcggccaccattgaagtgatactgcttcgcaatgtctcgtcgttaaagaagagactctgtacgacaagcgctatgccgatcgggatgagcgctatgccgataaacttaacgagcttgttcagggagcgcatcatctcggactgctcacccttctgcatcgccttggcctccagcgtcagtttggaaatataagagtccgccccgacatattcaagccttgcatggcactgccctgccaccacaaaacttccggacatgagatgatctccttttttctttgtgatctcatctgcttccccggtcagcagcgattcattgacctgcacttcccccgcggcaacgaccgcatccgcgcatatctgattacctgccttaaagataacaatgtcatccagaacaagttcctcggagccgacggtcgacggctttccgtcacgcaccgccacggcctgcggcgcattgagcattgtgagcttttccagtatattcttggctctcacttcctgcacgataccgataagcgtgttggcgattatgaccggcagaaacgtcaggttgcggaaggatccgacaaggcagagaagtacggcaaggacagcaaatatcaggttaaagtaagtaaatacattttcatgcacgatctctcctaccgtctgcgacggaggatccaccggcacgttccggtatccggccgccgcatgctcctttacctgcctcccggtaaggccgtctctgtagtccggctcatagcgggtgaccggcccgcgctcctcttcatattcatatatttcttcctgtacttttatatcatcatgatcggacttccgcctcaaaaacataatatcctccttgcaaagccccggccgcataaacatgtgcgcctctttgggacaccgctctgccttccggtaacatgaggttattatacccctgtatactttataattctataaacagtttatgaattttgtcttatttttcctgtaaatattctgtcctgcatattaatttaataaagatactctctaccatacttatccagaaattctcctatcggtatcggttccgaaaacagaaatccctgaccgatatcacagtggtaatgcttcagaagctcccgctgctcttctgtctccacgccctcggcgaccgccgtgataataccgagttcctggcacatctcgatcgtgtgctccagcacgatacgcgagcgtctgtttgtcagaatatcccggataagactctggtcgatcttaagctccttaaattcaagcctggcaagaagcgacagattagaatactttgtcccgtaatcgtccagtgagaattcaaacccgagctctttaaacttgtccatgagctggccgagcgcctcggcccccatcctgctgatgctctccgtcacctcgatcgtcaaaagtccgggctctatctcatacttctctcttatgcgggcaagactttccataatgtctatccccatcaggctgatcctcgaaaagttgacggcgatgggaatcatacggtacccctttttcctccagctttccagcagcctgcacacttcctcaaacacgtagagatccagctgctgtatgactccctcggcttcatacagcggtataaactggcccggcatcagcacctctccgctctccatgcgccttctgaccagcgcctccgcgccgtacagtccccctgtatcgatgtctaccttcggctgcagatatacttcaaactcaccggaggcaatttctcccacaagttttttcgcaagcatctcatgataggaattcttcccttccacagcgttgccataatagatctgtttctccacatacatcatattgtcactgtagccgatctgctctttgatatccacgtccccttcgcggtaattgacacctatggaaaagtcacacatacagtcttcctgctcaaacctgcgcagccgcaggattcgtctttcaaactccttgcgttctccgtcgatgaacagacagacaaactcatcgccgccgacacggtacgcattctccggaaatatgtccgcaagtccgtgcgccacattctgtataatgcggtcgccgtattgatgtccgtaattatcattggaatatttcagcgagttgatatccacaaacaataccccgagtgaatgaagctccctctgctgaagcccctcgatcgtctcaatataaagattacggtttccaagcccggtgagggtgtccctgtagctcagttcccggaacttatccagcatgtgccgttttgtaatatcgttctcaataaaataaggtaccgactgcagcagctttatctgctcagtaccgcaggacggattatcaacgccgatgaaacccaataattccccgtccttccagaacggggccgccataagtgacttgatcccctggccggctaacagcttataatcttcagacccctcttcggcaaactcgcacagcttgccaatatagaatttattctttgtctgaaacgtctcccgccataattttaccagacttatcggcagatcctgcagattgccgatctgtggtattacgccttttctgcaccactcataagaattggatacggtttccgcctcatagtctatctcaaagatataggcacggtccgctttataaaaatcaccgattatccgcagcagttcattgatggcagtgtcgatctccatgtgctccgacaatgtatggatacattccaccagcgtctcttctatagacagctgccgttccagttcctgatgctccgtctctgtctccgtgatgtccgtgccgatctccaggcgcatatttctgccgtcgatctcgatcagcttatctttcagctcaaagtatttcttaaatacaggattgtaatgtttccatatataatagcggtctttcgtcaaatacttattcgtacaaaacgggcacggctcctccagcccctgaagaaccttataacatttttcaccgatatacttgcagccggttccgaactgctcctccaacgcgcgattcatatacaccaactcgaaactatccggatctgatatgtataccatattttcactttcatccatgatctgggaagatatctgatcgtattccaacttacgtcctcctgttctgtacttccattctgttattgctattatatcttactttctttagcctgtaaaagctttcttttacttgtctttccggccttttttgtattgctgggccgccgggtctttgatattgtatatacgccgccattccttcgtggcgtcgtcccgttttgtctccgactggtttttgtacagaaatctgacgagcgggtacggatccacccagatctcattgttcccctctctctgggattcatcaaagacaagctgcagtccgaaatgcagatgatatgtatcgatattgtttacattctctttcgtgctgtaacccgtccgccccatatagccgatgacatcgccggcctgcacgaccgacccttctttcagcgagccggcaaagggaaaatcctggcgcaggtgcgcataataataataccgcctgttgtcaaaactgctgacgcctatgcgccaccctccgtactggttccagccaagttccatcacataaccggactccactgccaccacaggagtacctatatgaatataaaatagaataaaattgattggtatatatttccatgaaatactaccccttttaaggtttattatattcttgggggtggtaatatggtagggatttctattgcgatctgtgacgatgaagaatttttcagagatcagatgtgcgagcttttggactgctatgactggggatttgcgacaaggcttactaccgacacatacgtaagcggagaagatttgataaaagaagttgaggcagacaaacattacgatatagcatttcttgatgttcgactaaaaaaatcaatggggtatgatatcggcgtaatgctcaaggcactattaccggatatactgctggtgtatgtaacttcctatacaaagtattccctgaatattttaaaagcagagccattttattttatcgaaaaacctattttttcgcatatgttgtatgaggtcctagaccgttgcatagagaggatacgttttctccgtagggattacatatacccctgtgtaattaacggccatgaataccggataaacctcttagacgtcccttacatcgaatccgaactaagggttatcaaactgcacactttttcggatattatacaattttatggaaagctggataaagtccaaagagatattgcaagtatctgtaatttttttctgcgaccgaacaagagctatctggtcaacttacactgtattgattccgtttgtagaaaccaggtagtagtacgagggctggaaataagcataacggatacttaccggtcagaatttttctataattattcaaaatcagtataaaggaggcggtacacgtggatgataaagaaaagatatactctatgttgccagaagaagacaaaatagcgcttgaaataggccgcaaagtacatcaaaagaaaaaatacggtattttctggcctatagttagattcttcataaaaaataaacctaatcattagcatgtgaggtatgtaaatgacaagtacatggcagaaaggtgatcagtgttatattatcgagaacaacatgcatatcaggcccgccgtcgtagtccgatcaagcggcgggttctgcacacttagattttccggtggaaaggggatacgggtcagagagagccggctatacaggacaccggaagaagctgagatgcatgtgcgatatcacaatacgccgaggaggacacatcacgactatgaataagccccgaagtttttacgcttcggggttctgttatatctattattaagataatccgagtagcttgctccatgttgcagggccaacgataccgtctgccacaagtcccttagctctctggaatgccttgattgctgcctgtgtcttagttccgttgatgccgtcaacagctccgcaattgtacccgagagcgtttagccgctcctggaggagtgctgttatattgccccggctcgtccggccaagctgtgggcatccggccagcgtattcttaccggcgatcccgtccaccgcctgacgactgaatccctgggcgttacactccgcctgcaggcgagacacccatgaatcacctttcgctgtcggctttgattgcgccggggcgggagctactgtgctaccggtggcgccggcgactgctttaccgtctattgcctttactatgatctcagcgattcccttagcgccaatcttacgatataactgtgcatcacctgaattgtcacagaataaggtctccacaatcattgccggcatgttggatttttttaagtcgtggtagctcgtactgtattttctcccccggttgtaaaatcctttggccgcaaaattactcattattttgtccgccatactattcatggtcccgttcccggaattatacaaccagcactctgtcccatttcctgatccagttgaggcattcatgtgtattgttatgtatacgtcgcatctgctcgaattagccttgtttgttccttctgccagttcagctccctgggttctgccattagagttacaatcaacgacggaatgtccagctgccctaagcatcggaaccatttcattgtatatctttctcacctctacttgctcatccagtatccccatagcacctttgcaatttggtgaatgtccgcctcttaatccaattttcatagtttctttctcctttcattgaaaagagagcctgtctccaagctctccgaattttaacaatcttttatacgctgcctaatatttgacgtattccagtattcgtattagctaccgatgaagctgccaccgtgagcctacgagtattggatctatcaaaacttaatgtttcacaaccagctaaacttcctctgatgaataccggtattaaaatgttatctccggtatattctgttaaaattggataaaattgcgtacctgatgcactcgaagtattatcccagccaacttttacataaatatatctgtattttgtccaatcatcttttaatgatattattgtattagcagtaacataatttccaaaatcagacaatgctatgacttcgccaagtttattgaaattgctattcaaaacccttccctgccgtgcatccagcgcatatccctcttctgtcgtttcaaggttgttcgcgatatttaccggaccggccgggccctgatctcctttatctccctttggtccctggattccctgcggaccctgtgcgccaactgtgccggtatcccccttgtcgcctttgggaccttgtgggccagctactcctggatctcctttgggacctgtcgcaccggttggtccctgcgggccggaagcaccggtatcaccttttggacctgtggcgccctgtggacccgtcgcaccagtcggcccttgaggccctgtcagtccctgaggaccagttaacccctgcggccctgtagcgccggtcggcccctgcgggccaattgggccagcgtctcctttctcccccttcgggccagtggccggcactccggtgtcggtgtcacctatataccaattgccgttggcgccgatatgcggcgtggtcccgtcgtcacctcttgctttgacccctgtgtcatagccattgataaaccagtttccattgtcaccaatataaatttccggtatgaagcttgcattctcttccattttgtgatcctcctatttatttgatagctgtatcttatcaacaactatcaggacaaagagggacaacacataaatattatctcggcttctcgtatgtaagcgcctgctgactgtctcccgcgccttgcgtggtcgggtcaacgacaatccccagcagtacgaggaggttaattatcatccccgcgatctcaacaatcgtattctctgccacagccggcacaactccggcaacgccgagcacctggtacaccaatgcgatcaccgccattgcaatagccgtcaatgtgatcttgttctgaaatcttactttccaattaattttcatctctttccctccagttttacgatcctgttttcatgttcgttcagctgcttatcctgctcttcgttatgattccatatccgtctatgggattcatgattcttaacgtcaagggcatccatatccttctcgtaattgagcatcttctctgacagattcttcatcgtcaccgtcagctccgtcatcgcctttgtattttccttctggctcttggatatcggattataaatacttaggatcatgttaatcagcacgacgatgacaagtacaacgtcccattctttcacatatagtacctcacttcctatttttcaggccctagcacatcaaataccacgtcacgaaggttactcagtgccggcacctgttctttcgtataggcgccactctttacgttattaacccatactcttacgactatgctgctctcgttgaacatcaaactgcacctcctgccattgccatagttaattccgttatcgccgcgtcgagattatccgccgtctctgccgccagtgtcttagcctcgagagccgccgcctctgcgctagtaatcctttctgctgtcaaatcgggctccttggtaaggatcaccgtctttgtctgccctttaagttttacgccgccgcagatcgtccatcccggcaactcgccgaacttatctcccgcgtcagtcagcagatcaattttctggatattagctgagttcgagtatatttcctgtacctcttcagtggtctcgtccaggtggtctacttccagacgtccattagttacctccgcgcggcttaccgtatatacagtgccgtcaatcattcttgctttcataatcatcttcctttctgcatgaaaataggagccttgcggctccacgtttgcgggtttcatttctccattaaactataattttggaatgcaaataattctaacattatttagcgcagtattttttttcacctcaaaatatcctgagtctctaacgtgaatagcccaagaagtacctacggtatctatatacggtatacatatatatcctcctgatttattaacagctaatacatcgtattcacttggagataatcctagtgttaagtttccgcttgccgaagtcgtaccagatatcatttttaccttcggaaaattgctatttaacgtttcgagtgcctccgaacaaaccttaccgtccatagcacaacctggctctgttatcattgtgcttggcacaatcctattttcaaccgctctatcaatatcggcaagcacttctgtatctttgtcgccaatgtaccaattaccgttagctccgatgctcggtgcttgcgccatttcacccggtatcccctgcggtccctgcgctccccgctctcctttatctccttttgggccttgtgggcctgtggcacctgtttggccctgtggtccctgagggccggtatccccctttgggcctttaaaatttccgatcaatgctcttggcatcctgcttacctccttctcctattcgttaggcgtaacataatatatatttccttgatcatccgtatcgaactgtggcggcgaactcccttctgcataataggcatataaatttccctgttcatcgccggacagggtaaagagaccgcttactggcgttgtcacaccactatctcccctttctccctgatcccccttaagaccctggattccttgtggtccctgcgggccggtatctcctttaacgccgttaaactctccagcattccgacgttctaccatgtcattcaccgtataatttacttcttctacagctgccgatgttatgctctcccgatgctgttcctggcgttgccttacaacctcgtttttattgcgatcaatttcagcagcctgccttatcttttcttcgtcgatggccggcgcaatttgggccaatgcgtcaattagggtctggtactcatcggagctcgcaacttttatcatgcttaatgccgctggatatacgtacactccaaagactgctgatgacaataagccgccttgtttgtacaatcctatttccatgcttcccggtcctgctgccgcggtcatttgagacgttacccgcgcctttacagcaccattttccaacagttctatattgtcgtcattcattatctgttttccgtccggcttggtcattgttaacctcggaataacatcagttccgatactcactgggaccccattgttaagcaatgtaattatcacatatctgagaccttcgtcaccctgctttagcatgattttttcagtgcttggatacccattcaaatcaacctgaatttctgctacatattccatgtactcacctacctatcactacatattccatgattacgttctttgggcttacctgggttttggattccacattatacatcctgcatgaagactgtaaagtaagttccgctgtggccttatcgtaagaccacgtattatttattgcctgcaggacctcatccggatctgaattttctatctcaagacaattcagcattactaatacttctttgccggcaaaagcttcaggaagccgaacttttgctttaaaatcattttgggcattgagcacagtaacccctgaatccgacaggtataagtatggccaatcaccccggacgattcctctttcatcagcgacggtctgagtaccatcgttatgcataattttcagtgcttccggaagcccctcttgtaactcgatctgtatatgtccaccatgcgcgcctgtaattatgttcattgcctcaagagccgcatctgctgacacctgtttcgctattgatattttttcattgatttcagcttttattgatttcatagatgactctattcgtggtggcactgcactcaatgtaacactgtcataatagtgtgcgtctggatattccttgaactctatgacccggtgttcaatccttgctcttctcttcctgtctacaagcgtgaccaccttgtacatatacatgttcccgtcgagatttcgtacggcacattcgtacgaccgtaccgggtatgacatgacattcagctttgtctttgcggcttcaagcaggttcttggcaactgtatacctctcatcagaccatcctgccgatatcacactgctgctatactcattattttgaatgtattcctttccgccatttatttgagaaaaagtgagcgccttaccgttctgatctttcttcccataagcatataaacgggttgcaaaatccgaagagttaccaacataaccaatagacttaaggttcaattcgtctgtgaggtaatcgccggatggagtgtacttattgggctctattacgtgcacctctttttcaaatacattatagttaaataccacctcatatacttctgacgccttgcttaatatatccttgctgtttacattttcaagtccgctcccttcgcttgcctctatagtcgctctctttgttattccatcgccgcccagaagtgtccagccggacggcctgattgactcaaatacctgctttaacgtgctgttcgtcatcctgaaagtgtgccagaatctctctttccaatcgtccagatcaaggttgcattccagattaacatacccaccatgctcatccatcttcttaatcgtatatcgttgatttccatctgttatcctgacttcttctgccagatgacaatatgccggatgattgtctggaatctcgaatttaagtacgtcttcaccattgtatttatgttctatgtaccaatccttcccctttaacgtcagaggatatgataccgttccattttcatatatcttaagcatcgtccctcctacgcatatactggataataagttatagttactgggatttcctctgacaatctaatttcgttctttcccggcttaattttggggaattctataatatccgtgtgtgcgaaatagtttatcccgtttgctgtaacccgcccagaaatcccatcaatcacatacgttatatccggttctaaatcggttatggttataccggcaatcgtaaaagattgcacttttttcgcgggtgtaatagaaatacacagtcctgatgcagtgttcccatcgttatatatcacggatgaattatacagcttattctcaaccataggcttgcgccggatacaagaaaacttacaagtcacaaggtggtagggctcaatatctgtggcttcggattcccgatctgtcagaactgatacatattcaaagatatcattgcccttatgtatgatgcactgcttggcagccaggaacaactttgatatattggtttgtacatcttcaaaggatgcacctccaacgtaaaattcaagctccagctccatcggttcggcatcatagttatgcaggttgaaagtgctattccctgctgctgttgcgtagtcagcttctacctttccgggcgcaagaagaaatgatttcagatcagcgttgaactccatatatgcatccttagaatctaaaaaacatctttctccaacctgtgcgtcgtcattataatagtgcgggttataatactcttccattatgatcacctcactacgctgcaagttttaacaagtcctgactgagaataaattctttaatcttatcatatccccaaccaaactctaccaagccactcactaccatttcaaccgactgaactgcttttaattcatctgaactgaagaaatctcttaggttctcttttttggtcactccgtatatctcccgaagatgctttgcatcctttccgaatactgccttatatactatattggtatatgttgagtatgcatgtccgtgcatcctctcattttcctgcgaatgctgtaaggcattggttaaggcctgacgcactgcgatccccttctcccgctctttcatcttgccgatcagaaccttttccatagcgttaaactgacggatataagattctttaaatttcatagctttttcgcctgtgtatcccataactaaaagcgtaaatccgtcccttgtcataatatactctttattagacttaccgctactgtccttataggagctcaacgcaaaattgcgttcagtaaaatcttctgaacattgcagtgtttctatgtcgcgcagcacatcggcgtgcctcttataaaatgttccggctacatccctgctgtttactgttacaacttcctctttgttcatttttttgatttctactaacataaaatcattcctttctgttttattttttagtatcaaaaagggacacagttttaaactgcatcccccaagagcgtaatcaagaacttaccttgtcttgttactgtgcgtagtataataaaagcacttacttaatgggtaagtgcttttgcttatttatatcatagtacgataaacattttatatttttatctctgttcatacacgtattgaccatcacgtaaaataataaaccccaatgtgtcaaccaaggaaccttcctcgtcactcgctccataatcaacaatttctgtacccggtgtaaaatgcaaaactgtaccgtcatcaaaaactatattggcatagtcaacaactccaattaaagttcccattactttctggttcataaattccttaaattgttcttgcgtcaatgacttaagagcctcttttgttatattgtactttccccattttcctatgacatctcctgaaccactaagcgaaggctcaatatctatttgtgtgtctaatagaatattacccgtcttttcttgctccaaagaagtatccctctttaaacttgctaaaactttgtcatattctttcatatagttaatattgctttcaggtttgtaccaaagtgtgaaaataaataaattatcatcgctacaaaaggctgtggatattgtgtttatatcctgcccagataattcgcataatgagtaaattctgtaccctacttccgacgcaacagtggtcatttcagtttgcttaatctcgtaattctctgcagcggaaaaaactgcattttctacatattcctgaattgctgtgtcttccatgcttaccttattatctattggactggaaacaacccccagttgaacctcatcatttccataatttcccccattgtcatctgcactatcctcttcccagttttcaggtatttcatattcataatctttcacagtacatttcttgtaaacattgctactaaactccgtttttttagcatcacctttcttatgttgggtagcagtgggttcccccttttcacaacctgataaacataatacaaaacataacaatactattttcaaaaccgctctcttcatattctattcttcctcctcattaatgcctaataaaattatacattatggaacaggcttatacaataagaaaggagaatgccaaatcaagtatcaatgtttaacaactaagtattctgtgatataatacgagaaacaacgggtgccaacttgcgtcctgctttttcatcacttatataaacatctccgtctgtcatttgtaccgtgaccttgggagttatcggtgcatgtcttaacagatccactattttctcggccagtaagtcataatccggttcctgaattttaagatagactccatttttttctaatgagtttgctgcatttttagccatataaaggttattcattgacgtagttctcattatagactcctctttactaacaccgagtagttctccggtctgtctatataatgatagcgctctcgtccgtttggaagctgaaagaggtatagccatctctggtccggcttctccaaatattgaaggttccgatgcaattccaccataagcaaacaaaccgaacccgtctgagcttccttttttcatatttacggttatacttagaggattttcattaagatattcttgcatcccttttctaccagactttgcttcaggtttccaatcgggtgatttcatttctactgctggtagtttggagtcctttacttcagattccatcccggacacacctttcttagccattcctttcaaattgctttgaaagcctggtgttatctggtcaatcctactttttgtggcatttcctaatgtgtctatggtactgttcgatgcaccctttaccgttccttcactcttttttagtccgcttgataagttatctcccacgacaatacctagtgaacttaactgtgaaagtattgctcccctctttgacgattctgctgtttggagctgagccaataagtccattgccttcatttggacttctggctttttaccgtccagagaatttaatagacttgtagatgcctcaattccgcagctacttaatagcgtatttaattctggctttttcagtgatgccccatttgccacctgtgacaacaaatctaatgcttgagcctgaacttgcggctttttccctgcaagcattcctgacaaactgtctgctgattcaattccgcaagcgccaaacagagtttttatctcctctttctttagtgctgtgcccgttgacatcgtgttcagcatgtcaatcaatgaagcttgggcttccggtgatttttccgacagagcttctatcagcccttggggagcttctattccacattgtcgaaacatgtttgttaacgcagctttttcttgctctgtcttagcattcagttcagcggtcgactgttcagccaatttccccattgcgtctaccgcttcttgggttacaccaggtgcgccattcttaacagcttcctgcatctctttatatttcgcctgtatagtctctctctgttgttctaatgactctttcgtagctgtctctgctgttaaaaaatgctcctgtatttttgcgagagcaacttctacttgtgcggcgtcgccattggtcagtgcttctccaagcccttcataattctgtatcgtttcactatacccgatatatgattcttctgcctttttcagcgcgtctcgggaattctccaacttaccagaatatatttctacctgttcggctgctttagcatgttcttccgcagcctgagatgcagtaagcttattttccatatttgcatctttatatttcttctccacctggataacagcttctttggcctcttttagttttctttcataagtctcaacatttttcagctcttcattatattgtttttgcgcctctgatttgtttcttactgcttctacataatcatcctgcaatgcttcttgaatggctaatgccttcttcatccttatagcttcatcaatacttccacatagttctccatatttctgtataacgccatctgtaatagtgatttcttgccccaatgccgaagacagttcattggcaacaaatgacgcccgctcctcatttccggatttgatttttccattttcatcaacaagcgtccgtaattcgctggcaagattttgcgtgcgaacagattccgcttcaatcccagccaatgatgacgctctattttctgccatcgttgtatatgattcatgctgctgatttatcgcatccgctaagtccttttccttccctgtgagttggcttagcctctctatacgagcttcatctgctttatttgcaagatatactccccccgccaaagctcccattgccacagttacgattccgagtggtgatgccaatgcggctgttgctgttgataaaattccagtgctcatactggcttctgatgctgctgatgtgatgccagccaattcagaagttgccttcgatgtcgaaacctttccgactttttcaataagcttaccaaatcccttggtgagcccacctaccccttttgctgctcctcctgtgatcttgagcacaggtcccagagcagccgcaaatcctacggtcttcactattgcactctgctgcttcttgggcaacgcactgaacttgtcagccaagtctcccacggctttcattgcatctgttgcgactggtaatatctgtacccccgccttaataccagcatttttaagcttattaagctctttctgcatctttgcagccggcgtagaatccatcttttcaaaagcttcctgcgttgtgcccgctgaattccgcatttcccccaggaccttgttgtattctttgcctccatcggacatgatagacagcgctgcttttccagcttccatacttccgaacatatcggagagtgaaagattgttctgtttggcataatcatctagcgtttgtaatatccctgtcaccggtttcccctctgcaacaaggtctttaaatccttttcccgccacgtcacgcagagctttatctgctgtcgttccgctttttccaagctcgttaagcatagagttataatatgtcgtcgcctcggctgtctggatacctctcttggtcaagatagccatagaggtggacacattatccatgtcaacattaaatgctttcgctgtcgggattacacggccgagtgaacttgccagttcgtcaactgttgtcttaccgatattctgagtcttaatcagtttgtccgagacactggttgcctcatctgcactcaatccataagcgttgagcacagaggttactacatctacggcctttgccgtatccgtaaacccgccttttgcgagcttgaccatatccgttgtgaatccaatcgctttaccggtttctactcccgcagaaagggactgatacaatgcgtcattgaaatcggttatagctacacccgttttatctgaggcagccgtaacccccttttccatagcggaatatgataacaccgtagaatcagctatagtagatacctttgcaaagcttgtggtcgcgtcgctcgcaagctttaccgaggctgttcctgctgccgcaacaggagtagtgatccctagtgtaagtttattgccggcgccgtttatcttatcccccgccgcctgaagcttttcaccagccccctgccatgcctgcccgtataggatcactttattttgtgactctgccagctcacggttcatgatatttatggatgcttctgtattattaagcttagtcttaaactctacaatagactgttccgactgctctacttcaatgcccagagcttcgtactgcgtgttaagctgattaaggccattttcaagctctcttgatttctgtacggcttttacatactcttccgattcttttccgtgcgcctctgccgcctctttgaccttaagctttgattgctcatactttgccgtggtatcctttatcttatttccaagctctccctgcttatcttttgcatggctgatgatcgtgttaaggttccctatttccctgttatataactcacatttagattttgactgagttatctgctctgtaagggccttcgatttttgggcagcttgctggaagaccccggcgaccttattacttgccgactgcagccggttaaactctgactcggcaagtgcgctttttctgtccagattatcaagctctctgacagcagactgagcagacgctctcatccttgatatgtcaaggtctatatatccttttgctacgccataatcttccacactctacacccccaattccttaaaatactcggccatgcttttaaccttctttttcttcttttcatactgcggttctttcccggctttgatcttgcttactatgtaattgcacgcttcatcaaaacaaaacgccgtatattcatcatctacttgcagtatttcgcttggttccctgttcttcgccgccgccagattcagtatcctgttcaggttcctgctcttcacgaaaccctttgagcatctgtacccccttttgcgtgtacatatatatctggaatagctgctcgtctgtaagttcgatgcctgctttctcaagttcttcgtaggtcggctctacaagagctgcttttgccagacagatcaccgcaccgcttaactccttgaactgatcaccggattcaagggcgccggacatccccgtatcaaagagagttgccgcagttccaaggagttgatttggtatctttccatcctgcgccagccgcataagtgacggtcttctgagttttgcaacaaattgctcccccaggacgaatcccgggagagctacttctaagcctttggctcctatcaaatcttcaattttgcttaccatttgttcctcctatgcctttgctgtcacggtagttgttcctgctgcccgcgcctgattttctccgttgacttctacaagtgcgatcttctgtccggttgctgctgtgatctctgctgtgccgtcccagtttgtataaccggaactgcatacctgatcatatacagggagcgtcggattggccgccactttgtatttatagctgttccctgcggtaagggacggtaacacggtaatcttcgtatctcccgtatttgtcccctctgtgcttgtaactgtaagctcaccgagcgtcggcaccggttcggaaggctccattacttccggcagtgtttcgacatactcgacagcgtatggtggctcgttcttctttggcatggagttcagtacatattctgctgtacgccactcgtcatccttggaattgtaagataccggctcgccagtgcagtgcttatatgttgtcttttcataactcagcgtatctcccgcagaatccatacatgcggtatagatatccacagtgtattttgtcctgttatccgctatactgctcgaaattggcggtgtatacctcagaatcttgccggcgctgtccctgacgatctctcctccctgaactgcctgcgccatctcaagcactgtcatattatcggtgagagtaatcttaacaccggtgattgtcttctgctccggcttctgagcttttaatgctcctttgatcataagtttatttgcgtctgtggtctcaatctgaacctctgttgccacctctgtattggatgtaatgccgatcgcatccctgctgccgtcttccggcgtcataacgacgaggcacgcgtcaatagtggccacttcctccggccgtcttatgttatccataatttctacctccttgaatcaatcctgtttattttgcttatatttggcacgcggtaaataaggctcgtcatgtaagctctcgcatcatcgtcaggataatgcggctgctgatcatcaaccagttttactatcggatacagcctgttcatactatcttttactttctctatatattcttcaaatccactgtaatgttcaataggataatatatgagaatttcgtattcccgggcttctatgctccttatttgccccgcaccgttgttccttaacaccagataaggcgactcacatatccccttgtgctgtccgagtgagaatacatcgtatccgctctgttccaagtgtttaaatatctctgtccatcctgtcatctaatcaccttagctgcgccagccataatctcaggccccttccttctcagtgtggggtatatgaccgcgtattttttcccgtttgcgaactcaagatataccccataatccacgccatgtgccagatagatgcgaataccggttcctgtatggacacaatacccttttattctctgtactgcatgagccgtcctatccgtccacgtccgtgacgcctgtgcgtcgccttgtaactttgctgctgccgtattaccataagcaacgagcgctttttcagtcctttccgggatcatgcttaagttccgtttcatatcaccaaaatcaatcattatgctgcctccagggatagatcaagacatagatgcaggttccccaagtcatctatgcctgtaatctggtatttgatcccgtcaatatccaatatatctcctttaatgatatcttcccggaatatgatcagtaattttggttccctcccggaatatgtctttcccgcctcaacaatggtcacgcccagataaccgcttgcttcatggaatagtccacggcacttggcaatctcatattctccctgcggttcgtggaattcattttcgccccgccggctaaatacacaatctttgccgtgtaactccatcgctcttttgagcttatacagctgatgtttcaactccatcgattatcccccttttactatcgttgtgcaattggggcggtacatggaagcgagtctgagccagtaagccgacgaatctgccaaggaaagaccggaaacgttcaaagaacattcctcggcctttatgatcaggcagttgtatgtcgccacatcaacatcattaccagagcgttctaactgatattccagttcttcgtcctcaaaaaacggcacctgcttttccctgagattcttttttaactgatcaatatgttccatatggtgtctcctcattaaccatttgtaataagctttgccattggtattgatttaggatcaaatttaatatcccaattagcttttgcgaacagctgagcgtccgttggcgactgtgtccatccagaggccgggaccttaaaactaaatccgtttggatgcagcgtctctctcatgcgggtaataagttcatcctgaccgccgttcttcttagcatctcggattgtctcaacaggcacatctacacgtccttttgcagtacggataactccactgccaagaagataggtagtgtatttcttgtgacctttatttgctccatcaccaccaacagcttctaccggaacgctatcatcaacaatgactgtatagcctgcgatgtcggcaatctgcatttttctttcaatccccaatgggtccgtatacttacggtattctaagagctgaaggttttcataggtattggctacattagagtgcataatcgccaggccaaacgctcctttgctgtctccgcaagcgagggtagcaaggtcattaaggtcagtttctttaattttcctctgctcttccgttgtagagctaagatcaagtacatgattttctgaccatttctgggcatatcctgatgcccccgtaatcttaaatactgcatttgcaattccgatcaaacgcatctgccgacgtttctgccagtaacgacttatggttgctgcgatatgtcccattggatcagaaccagaaagttctgccgtaaagtttcttgcaaagaatcctttcgcgcgtccatatactacgccagtctgagaatcgccgtcaacttctgttgttgtaatgtcagtctgtccatcatagttaacgtcctccccatccaacgtattgtagaatggaatggtgtaaatattcccactcccctgaatcattgattcaatcgtactgtcctgtacaacggcaccggattcaatcattgctgttaagtatgggtccggtgcctcataccatgattctaaaaataattcctcatcaaaaggaatgccaaaaatacttcctgccataatttaattattctcctttctcaatctgttccctgaccgtcttgtaaatgtcaggctgctctgtcttgagcttcaacttgtcggtgtatgacattttcttatagtcatccactgttaccggtttgtctctgtgtgtgcgttggaaattacctgtaccaccagttccaccaggccccgccgtctgaaactgcgccgcatactgttcttttgtggttttgacgaaattctcagtgtccttcaggttgcccttgtcgtcaaactctactgaatcacccagcttatacatcaaataatcaatgtctgtacatccagctcctgataaaactgatcggagggcaaactcttttcggtctttttcacggccttccctttcccgtgtcaactgtgtctgcaaatccttaacgtcgactttttcaagctctgccaccttcgtattggccgttgttaaatctccccgcaacgtagtaatctcggtatcctttgttttgatccttgcatttagcgcgcctatttctgacatattctggtcaagaatcttatcaatgttttctttttcgatacccatagattctaaaaattttctatccatatttctcctttcagcacttcacttttttttgcgtggtgcgctccacatgtgcccccgtagtttcgcgacttcgggacggtcaaaatttgggtataataaaaccactgccttgtaagatcagcagtggctatttaccattcaacttgttcagtttttcctttatctgtgcattcagcatttcaaattccttctgcctttgctgccgtacccccttgttatggatacctgcgaaccctttcagttcatctctttttttcatcattgttcgtattgtttcatctgtcattaacactgtatacttgtacccacaatgaggacacacataaaaagttctctcaatcccgctggccaacatttctttttctaacttgactccgggaatgctgtccaatgcagtcagagggttatgtcccattttcaaccgcttattacacattatacactccgtataaattggattctccatattatttagccttcctccttccgatcgtttcatgtacaagtgttccatctgacaggcattcccttattcttatcttggtcgcccggctcttatctactactttcatgtcatcatcaaagtaatatatctccgaatactccccgccgttaggagtttttccctcaatgcgttccatctccatccaaatacctcctgtacaatttacacctgttcggatacatagactcgtaatatgcattatccatataatatcccgtcacaaaatccgcaaaatcctcagcttcagaactgctttcttctgcgtaatccgatacccacatttggccggaatatcgtgcgtcctgttccatcgcccttttatattcgtctgatgcagacaatcggactcctcttttgctcttgacttcattatcccatatatgaccaccttcatgcaagaatgtttcaagtatctgactgtttgtattagcttcgtccggattcgcataaaacgtgattcttccctttcctcctgtagcataggaagagaacccttctattccgtactgcttttcccagtacaggtcatcgggattatagtaatcaacaaattctattgttttgatgtgcttagcaagctcgacgggaactttatcataaactttcattgccctttcggctggtatacattgtgccgccttatcatatcttgatggatatagaaacttagtacctgacttatgatcgtaaactttggccgaacgtatattactgtctttcctgaatttatgtgatactttggaataccccttctttgggctgctcttattaagccattcatccagcgccggattatttttccctttagcccagtcgcttaattcgctcgcgatctcgtcgattgattgagttataacagcagtcaaaaagcacatgccatttggatggtcaaggggaactttatccttgtcgaactgctgcccatcccttaacctgcacaattcacacgtcttcccagcatttgacgagtgccattgatatttttccacaaatgggttgtcatccgtagacctctggaatgccatctgataagcatgagtaatagatgtccgtgatagccgttgtgcattataatccaccgactgactgctgcccggatataccttcctccattcccagggcttctgcgctcttggatcaagatacatctccaaatctttcgccaaatcataggcagatttctgctcaataataccgcgattgatgatgtatccgatatcgcgatcatatttacctttgtaattccacagacgctcagataatccggtaaagtccttatatattccgccattcatgagctcatctacgcatgtctgcgggaccgtagaaagagtatctttgaacttcccagataactccgggatgatactcccccaaaacatatattctgcatcagtcacagcttttgctgtccctaacaggccggtctctacaatcccctgcaggctagtgtatagataagtgctctgtcctttcagagactttgcataatccttcagccatctatatgttaaggtcttttcgctcttccttgcgatctctttccctgcatccttcgctatatcccggtagagcttggcaatgctctgttgctgctgccgtgtgatctggatacgtttgagctgggcatcttgtaccagctctctgtactgccttatatgtccgtatggcactattcatcaccaccagttaagtcgccttcataactatcttcaaatgctcgcttctcaaatatcatctgctgtatctcagagtcagcgtcatcatccgtcatccccttatgatctgggccgccccattccatcaaatacgacttaattgaccgggcaactccaacctcttgcaggtcaagtttgcgttcctctgcttcatcctccggcagtggatactggttatctatggtaatgacatgttctgcattcttaaaatcaccgtatacactctttaatgctgggaatttctccgccgcatacagcagtagttccgccatccattcaaacgcgggcttccacgccgcccacttagcctcacagcggcagatcagcggccaatatagcatcttaagtcccttgccagatgtcataagcccctgtgttttttccaggcttaaatctggtattccgagactgtcatgcatattctcacttataatcccaagtgtatcggagtacgcatctttgtacgagaacttattctctatagtacccacatttggaatgtttccaagcacaacatctgcttgcaggtcccatacagaaccaggtgcagagcttaacttttcaaacgccttgggggaagcccctgctatccaaataatctgattcatcgtcttccggacagtatccaaatttgcagaacgcatcttattgtaccaagagtcctcgtccattatagtcttcacgtcggattctccacaagtatcaccagacaaaccatcattgactataacatataccggaatgcgatctaatccggtatcagcatcgtctttactgacgcttccaggtatcagttccccgtatccgtcatgtaggctctcggttaccaggcacttgccgttttccattctgtaacgctgccgccaccatttttgatcctttttatcttccgtgtcatttatgcaataaaacagaacaactttcttcagaatatctacatcgtcatactccgtctcataaacaaaaccatcagccggcacgaacataatactcaatttatcagcagaaacattgaccttaagtgctacttttcccccgataaagcagtccttcgctcctttcagcagtttatcggaccagatattcttttttaatacacattttatgtattcctgcatggctgattcattcggtttcccttgatctgtcttttcctcgtccggacaagttatcttgatgtctggcggtttcccaaccatgaattcagcttgtttcgatatcagccttttaatcttttttgattttaagtttgttggtgcaaactcgtctgtatcttcgtactcggtctcgaaatccgctccttctccgtatatactgtaatatttatgtatttcatttatcctatccgtctcaactggaccataagggccggataattcacggattataaataacggtaaatctgccatcgccatactatcacctctctccatatatcttatcgctgtatattccgtatctcatagcatccatacagtcgtccatttcttttaccggctcgtcagcattttccttccaagcgtatacacctatctcccgtttatacagggacacgttttccttaacgacatatagccgctgctgtttaaacagagacgctacatgtcctatcccggcaactacatctttaacggcgttcatcgcacgtaaacctccaatctgcatctcacgtattaagtccggccttgcggaatcacagtaaaaaagtatatctccgtgttggtcaacgatctgtttccctatcgctatccagtcgtcaatgctcctatgctttgctgaccactccctgagcaggtatatatttccgtctaccccaacaccaaataagcagaagaccccgttatgctcccaaccaaagtcaacacctacaaaatgccgcaccataggcggaaccttatcagcagatataaaatgtacatcctcgtcgaagtctggatagacaatccctgctgccgctacccatgcgccgttaatgtctcgatcagtgaacatgcccgacggtgtagaatcaatgatactctgcttgtacctgtcagtaaggaacgtattgtctgtcagtttccagtgaaagtcggcaatcgttttcccgtctgcccggttaatatagtcctgcttcagccaatgcatgggtttgtccgggttggtgtcgatcagaagcctggctccatctccagaacatcttgacttaatctcgttgaatacttcctgattggctacagtaccctcgttaatataagccccataggcagtcatacctcgaatccggccaaggtcatttatctttgagtgcccgaaacaacatacctgaacgccaaacagcttgaacctgttgtatttgtcaaattgatattccagtccgtacttattggtaagctcattgagaatgtttctgtggatcgcacctaagtcagatcctgcaagtatgtattgagggagagcaactctctgcccggttgctatctgccggactcggcggagctcatgaaggaaaaggtcattatccactactgtcttgccggaacgcttcgctccgtggttgatcagcatgaagtagtcgttattcatggcaaaccgaagaacttcctgttgtttagggctgtacagatcattcagactcatctcttacagtctcctctaatttttcgagatatcccgcaatttggttttcggtcccttgctctgtgcgcacggtcttagaacgcaactgttcaatccgcgcccgctgctcttccgttgccatatccatatgttcggctatccagtcaagggctttcattcggtcggccagcttaatgcttgcgccatcacgcccctgcttcacctcagttatgatcgttccgtctacttccgtatgctctctgaaacgtactgtattaacaacctttgttaccttcttcttttcacctgtgtcctcgtctttaacctccaaaggaccgtacattgtcataaccggtacttcctcgcgcccaaactccacgtaatcagtaatgtcagaaaacgcgatatccatatacttctgaaagatgtctgactcgtccagcatttcccggtttaacctattctgtttgaggcgctgtatttccgctttgacaccagcattctccagcagccgatatcctatcgacgccgccgtactgtaatttacgccgtaggctttctgataagccttagtagcgttaaaacactttatatacttcaagcaaaaaagccgttgcttatcggttaagtcaggattatctattacctgctttacctcttccgcaatggcttctctattgttcgctttaatattatcccgaacgttcgtaattgattccgagcgttcgcttttctgttcggcatcccatttctgggtactcttccagcgtcttactgtcccttccggctttttcaatttcttggctatgtcaaccagactcatgccggaacgatataattcttctgccttttttgagtctgggcttctttgtcttggcatctgttcaccacctgtttttatattgctttaacttcctgaaaagccctcaaaattttcgggaactgtattgcaaaccagtctgtcatctcctctgactgtgcccacgcctctacatctccgctattgttccagagcccgctctcgtatagaaatgcatgtatgatctcatggcgcagcaccttctttgtatagctattaaggtcccctatactcatcggcccttttttaaatcttcctactactatttcttttatgctgtggtccatataaccatcaacatcgttcagatacggtctttcttcttccgttgcgaagatgaccttataattcgtacctaatatatctactttcatgattattctctccatttttaggttaatgcagtttttttatctataccgaacaaaggaggattgatattgcacaaagatattgttaacagttgccatgacagagaaactgcaaaaactctgaggcaggatgcccggagccgaaccgggacacagggagctgccctgcacatctgccattgatgatacatcccacatgacgggcctctgcccgttagcaataatatttttcgtgccctgcgtggcactatcggggtgttttacgtctctgttaatccgttccgacgattgtttttatacagtgtcgctcactgacgggcttttgttttaacgtcttttctccataacccgtaaggtccatgacgttttacatacaaaacaccgcccagggtaatcccgggcggcgctctatataggagggtgatgtcattccaaaacgatatgtcctaatcgttctagcataattatagcatactatttttgtgaattgtgtgaatgtttgagatatctcgatattttttttgagatgttacttctctccattccaacgatttccgcaatctctttctgtttcatatttacaagatatgttagctcaaatatctgcttttcctctccttccggcatagaactgataaatgtctctacctcttgcatcgccgccagtacgacgtcttttcgcgattccttttccttaatacgcttttttaattctgcctctgcccgcggttcagccatttcaacagtgatatgctcctctatgtacggaaactctctccccgatcctgttaccttaccggaaataacgggaacattagcaagtgcatcgtataacctcccgatttgacgagacaacattgcaagctctcttttatatctcttataaccttccagcgttcctttatccatctataacactcccctcctttatccgctgtactatcctgcggatagtctcccgttcccaactgtccaataacccggctcttgaggacaggtagtttatgtctgtcttaatctcgatcgttgtctttacgttaacgtgctgcgctggataaggctggcgccggaacctttcccttgcatcctgatccacacatttctccatgtccttgtgtaccgcatctttatgtagtttctgctgttcgtattgattaagcaattatctccttcctttcctatgctgccgccctgcgtctaacgctcctgagcgtatctggtgtgctctccgcataataccggctcgttactgcggggttgctgtgtcccaatacctcttgtactgtaccgatgtctaccccttgattcttaagctgcatcccgagcgtcttacgcatcttgtgaggatatactctgcatgtaagtcgttctctctgtgccattgccttaagcgccgcacggatgccagtcttatcaagtcttttgtaaggtgctctgcaccaaacaaataatgcatcgttggtatccttcctgctgtccacgtacttacttagatgataccgggccacatcatcaagatagatcacacggtaacggcctcccttctcacctaagatggtaatatctccggtctgccaatcaacatcgtctgtgttgattggtactatttcaccaacccttgcgccggtactacgaagcacttctaacaatgctctgtcccttaacgtctggcatccttcccgtagccgctccatctgatcagggcgaaagtaatctatcggtttccttaactccttcttggcttccacactctctacagggttgtatgcgataaacttttcctttcgcatccaggtgaagaatgctgacaggtaacggcgttcattgttgcatgtgctcgcctgatttttccgtccagtgtctatttcgttcttatgttcgtaataccgaaggtaataatcaatatccacttcatctatcttagttaacggcttgtctatctgtgtcagaagtccacgtacggccctcatatactgcacaacggtttctctggacaaattctttttcttgattctaaacaggtctgtcagataccggttttgttcttccacgcttctttctaccgtcgccggcaaagtggtgatctgttcaatattcaaaaatacaaactgttcctctattaccttctggagaatatctaatgtcaccgcatccatatatacactcatttgcagcagaatattgtttattatgttactcttaatattcacattctcatttgtatacatattatttcccccttagcaattgcctaagaagaatgcctatgatataatcttcttaggtgaatgggtaacggagaactcgccaaagtttacaatccgttacctgttttttattttaacattttcctttctcgaacactttgtccttgcaaatcaattttttagcatttatactgtacacgtaaggtatattattgaaagaaggataagcaatggaaataacgtgtgatgaatttgattctcttaaattaacatgtgatgaatacgactcacttggtttaacatgtgatgaatttgactcaatgacattggataaattaaaagctctcgtgtcgatacgtttggaattatttgattccataaaaaatgatactcctctaacggataaagcaattaaaactgtacaagaaatagctaccctttacccggatgttgcaaaatccacattacccaatagtaatttgccaaacaaaaaagcaatcgattattttatcactttatgcattagtctttttactaatccggatgctttgattttctgggcccaaaaactaaaagaattaatagactatttatcatgacttcaccgtacattctccactcacctctttaatacgtacttgtataatgtcatcctcggtggttcttgcctccttccttttgttaacaaaatcgccgtttagtccttcaaagaatccaattcctgtataattccctcgatgctgtattctccgtattggatgaaacatgttattgcctcgcttaagttgtacgcattttcagcacttgtcggaatcttttcgaggtctacattgtcataaattttatgcaatgtttcaaacacgagattcgttgcactgcttgctacttgttgcaccctcttggcttcctggatcatatcaataagcatatttttaacatcattgttcataatttactcctcatcgttagtcaaatagttccaattgtttcacgggttcaaaattcatccataatacttctttctttttgctgcatgtttgtgaatagcagattgtcgtttctttatgccagccttttaggcgatcattgtataaatcattatcatatccacttaacagcaccggtcccttgtggtctatgagtacgtcaagtaattcattttggcctttgtcatccatctcgtaccggtattgtttcccgtgtctggtccctaaaacataaggcgggtctccgtaaactaagactttttgatgattgaaccttttaatcagttccacagctggccgattttctatctgcacgcctcggagtctctctgctgcctgcatgattttttccggtagattacaccagtcttgtgaagcgtatgctctttctcttccctgcacatcatttttccatcccactttttctccattcgtccgaaaaccatgtcccatgttgagccttatgtaaaaatttaccgctctctcaaaactgtccgctggcactgttgcaaaagctgtttcatatacttttctggcatacggtgtataatatatcgcatgtgccagcttttccggatccttacgaatccactcaaagagattcacgacgtttccatccagatcgttgaccgtttctatgttgcttcgcggcttattcatcagcactgccagactccccgcgaatggctctaaatagctatgatgatccggaaagaaggagatgatccattttgctatactccatttacttcctggatatttgaatattgctttcaattacttgtcctccctaaactccattttagctattcaataaattcaattccttattcacttcttataaaaaataactcatttcccacagtctgcgtccttactggtatactttcccttcttattgtcacgtctatagaccttcgtcttttgtttgcgatcatggacgtctcatatgttatcctcattgttttatgatctgtttcaacaaattctttgactttaatatattcttcacttctagcacgccctccggtgcgtttaggtacatcaacatcataatcaactttaatcatctgtttcactcttaaacctccatttagttacgcaaaacgtaattgctcaccgctgtcgtctatctgcatatttggcatccgatcaccaattttgagatatggacaatttgcggatacaagcatttgcgccataatcggcacaacactgtttccaattcgtgccacctgcttacttattgggtacttatttccgttataatctcttgaaatgatgtagtctcccggaaatccctgcccccttttcaattcctctggattcagcatacgaagaaaaatatccatgatagcgtactcgctcccgaggattgttaccagcgcaaacctgtcccttgtgacgatcgtatgcagagggtctttcaagctttgtcccgtcccacagccgtaatactccatgataaactgactcacccaagtgcatttctgtgctgtctcttcatccactccagcctcttgtaactggctccagtcaaccgccaagatgtttacttgtccaaagtgtcccggtgaagtagttatagtatgtattggttcgatcaccgattgacctgtacaagttttataaaacttgctcatgaatgccattacgaacccatatctattactggtgtctatcgtctgtatcggctcttttacttcctgcccccgcactccggtcttcgttgtctcagaatggtactgaataagaatagggctgcacaagtaatgtttatttccacttgcgactattgtccccacaggttccgttacgctatttattctcggaagttgcccttctctttctccatacccgattggtactatatatggtgttaccgttccaaaaccatgcttttgcgttaaagttggtattggattatgaatattctgtccgcggaaattatccccgccatgatttacctgtacgataaacggctccgggcagttgaatacgaacttatccagcccccgcgctatccgtttcatggtgttatcagccagtggtttttttctcccgaaaattgatttccccaaatcttgaaaatcgagacttttccagatcggctcccacggctttagtccgtttattccgcatttactatgtgtctgtttcggccacacaatatcatttccgtctctcctgaaaactgcataccagcgttttcttgtagtaggagctccataatcggcggccacaagttctttgctgtcaaatacataccctagagttttcatcgcagaaataaattttttgtaatcttctcccttacgatccttgattggaaaccctttttcatcaagcggcccccattgttgaatctcctcgacattttccatgatgatgacatctggaagaatcgcttttgcatgtttatataccgcccacggaaggatacgcagcccttttgcccgcggcttaccgcccttcgctttactgtgactagtgcagtccgggctggcccacattagcgcaacatgttggtcttttacatacttttttaaatccaccttgaaaatatcctctgtgagatgcaatgtgtcagggtggttagttttgtggattaatatggcatccggatcatgattgatcgctatatcaacttgtctccccagtgccatctctatacctacgctcgccccaccgccaccggcgaagcaatcaataatcaattctctatccatctcgaaaggaagccgtgtacacttgccctgcaggagcttccgcctcctttcttttgttttgaaattttagttaataaaaccatcgtcaaacaagtccatctgaccctctacatttttgtcttccatccaccataggaaaacttcttcaccagtcttccattgacttatttttcctcttcgctgacgttctatcaacatccgaccaaaagcatgtacatacaaaattctatattccgggaaatctgcaaattccttatacctctttttaccggcaagtggacaccctacacatcccactctttcatatccgcattggtacagttggcacacaggtatatgttcggctctaatgaattcccatatatccgaatgcctccagtctattattggattcacggtcatcgtatgtttttgcatgcacagttctgtcattcgcctggaagagatgttgtcattcatcaatatcttttctgaaaaattttctgcttcttttctgtttttccctattttctcaaattcccctcttgttgccctttttgtcgattcgtcccatcgtacacctgtggcaatatatcggttagagcaggccccttctttgagcactctgcaacaatacctaacccacttcgtgggtggcattagtttttgagggatcagtgaccacattgaaactcgttcgcctttgtatttcggttgttcgatctcgcatttgatcccctgtaattccagctcccggaatacttttttgatgtgatatactgtctgtggcgcgtctgctgttgtatgactgttgtgtacctcatatggcacaccagaacgccggaacaattccagcatgacatcactatccttccccccactgtatgtacatacaagtggtttcccgtaatggtataggctcatttctgaggccattctaatcctctctattgattttttttctagatccattttaaaaggttccgtgtacactctcccggccggggaacggctccttcctcttatttaaaaaatctcagtttaaatctgtggctcattgattcgaccatagaatctaaaaagattgtgttcacagaaattaataagtgcctgtttttcttcttcttggatgttttcatggttaattccgtacccagcattcaatccacttttaaaagcatatatcatagcttcctcaaaatcttttacctttctaggcattttcaatgtgtttccctccttaaatcttaagtttctggataatgtctctcttccaattcatcttcatcgttacacttttcgtaaaatgggcagcgatctttgtactggcaaaaagatgtatgtactccttccctgcaccattcttttttaggattattttgatacctataatttttacaatctatcattcttcatctccgacaaaatgttatttttctgaagctgctctcactacctcatttcgtgtcaagaagagtgtctttcctatacttgacacgggcgaagaaccttctattccacccattgtgtattggatgtatagctctccatcttcatagttttcctcgtaatcctcatcatcttctccaatcattctcccaattcgatatcccataacaagagcagaacgctctggaaagtcaatgtcccatattctcccaccaatagctactggtaactctaaagttaaatcattcataattttctccttctctaaatgctaagtttctggataatgtctctcttccaattcatcttcatcgttacacttttcgtaaaatgggcagcgatctttgtactggcaaaaagatgtatgtactccttccctgcaccattcttttttaggattattttgatacctataatttttacaatctatcattcttcatctccgacaaaatgttatttttctgaagctgctctcactacctcatttcgtgtcaagaagagtgtctttcctatacttgacacgggcgaagaaccttctattccacccattgtgtattggatgtatagctctccatcttcatagttttcctcgtaatcctcatcatcttctccaatcattctcccaattcgatatcccataacaagagcagaacgctctggaaagtcaatgtcccatattctcccaccaatagctactggtaactctaaagttaaatcattcataattttctccttctctaaatgctaatttattgactctgttcccaatgcctgttataataatgtcaaataacagggaacgcaaagccgtcagagacccttgtgtggttgcaattccacaccctcggattaagttccaggtctgtgcacaggccagcgaaaacgtcgggcagagccgcaaggctcttttttatttcttcaaatgttaatttctcttattcgccatccataaaaaatacaaactctgcttgattgcatcctgccccagttatcgaccattcttttgcatattgatatgaatcgcatagactttcaataatttcaatacaccggtgttcacttgcatactcacctaacttagcagtcctaccatcggcaaaatcacaataaatagttggagttttatgcgaatatgtattatcaacgtaaatttgtccaaccgtttccatcaccactaatgtttttctgtcctgactttttattaacattaccttcctcctctatctgaaatcattttccatgcttaatccgcttctttttccgtttccctccagcggctccggcgaagataaaagcattcatgttcccttgcttgaatcctcctgataccctctgttttccgctgttgtgggtgtgtctgtttaactcgtacatatgctctccttaatctcctctatgcttgtgtaagttcgatctcccagtaatgcccgctcaagcttgagcatgtcataatttctctctggaaaattattaaatttggtacgctttggtatcaaatcggcaggttttggaggaaaatgctctttccgcatgtagtctgccagacattgagctgctgtagtatactcaacgtctatcacaagccgataccacaattcgctgttactgtcagttatggtctgcggatatatctcattcaaagacttgatcaataccgcaaattcttgtcttgtcattctctatcccctttctaaaaaccgggtagcaacatctttgtttcttctttcccatgtccttacggccgctttccagtccttcatcttgtttttacctaacatccaacctttagccgcgtagaaatcaacaaatgcctgagaatcaacattgttacctcgctgctggcaatataaacgcacctcttcaacatcaggcggattaaaccgcactgtattttttatttcctttctttccttcttactattctttccttcttctattgttgtcgtttgaatgtcgttagattgtcgcttgcttggcgtttggttgtcgtcttgtgtgtcgttcgtctggtaataatcatagttagttaccgtaaatacgctgtatttagtgtgtcctttgcttgtcacttctcctgtcgtttttaagtgtgaaattgcggtcctgatctcacgttctgtcagccctgtctcgtccgacaacttacggatggaggaaacgaatgaaccacgcggcaccgttgtgcctttaaattttccgtctttccaatttgcccgcagtagcatatgaacgaacaaccgacaggtattgatatcttgataccattcccactcaagaagggagcggcttattttaatgtaattgccattcaccatctcaccgccgttcatatataccgcagttttctagtgtcttaatagcggcatcaacgataagctggctctcttttatacggctttcttcctgaccaacccaccgaacaagcatatctacatctttatcgtcattcatgttgggtatgaagtatccttttccattttggaggttaataacaggtatcttcttcctcgcctcatggagcagatccctcatggctctgtcaagcaatccagaaagcttacatagacagctccgcttaattgcgtttttgctgccagttggaatcaattctagtagagattcttccggtaacagcggtgattcttcctgctgctcttcatactgcttcaaaatatctaaaatttcaatctgttcataatggtcaaagtccatgcccctccttcctccccggcgcacggccgggggaagtgtcgtgatacactgctgctgttgtcatcctgcgttataacaagattggttaataagttactatagtcaaggcccgtggccctgctaccttgagtagaaaaactctctccggaagtcctcttcgcttccgtaatgcttaatgtaatactcgtaacatttccctcggagatactcgtctgcctccttggcgccttttccccggtgtacaccgtttgggtgcaggtcgggccggagcggggcgacaaacccgtatttctcacatagttttcgttcatttgaggtatgtgaaaacacgtgatggcgctccacgttgtaactaccgctgaaaatgcattcgtccatgttatcggtaaatatactccatagctgtttagacaatattaacaccccattgttctttcattcttttgatctcgtcaggcgtatcagttggtatatctaactgttgacactcatatatggcaccgtcaattagcatacatgcttcgtcaatcgtatatttgctcagccctttccagcaccgaaatccatattccgtatattgcctgccctcttcatcgaacaatgtttttgttccgacgtgttcaatgatgcggtaatacgactttacaagatatagctcttcttcctttgcctccacctgggcagatatgccgtgctcgcgcaaaatatgatgatatatatcattttcagtctgtccgtttttgattgagcttcggatagcatgtacaagcgaccagaagtatttcctctgcttgtccgtcttactctccgtgtgaacctctatacttatatcaatgtttttcttcgttatgctgctgataagggagcggatgctttccttcacgtagtccggcaacttgatttggcttttgatcaatacaggcatcactcgtcaccatacttccgcttaaatgcttcaagcagcattcctgcctgtttttcggtcatagagtcctccgaaacattattcatcgcataaaccatatctacgtccttattgtgcttctcacaaagactatggattgtcttcttctgcgcttctgtagccggcttatctggttcgggtatcggctcttgattttcaacctttcccaactcaaaaacgaccttatgtgatctgctgttcttgatctggagattattgatactccgcttatcatcatacccgatcgagctcacatagaacttgtcatagcatgtatagcctgtaactttaccattgatttgcttcgttttgatggtgcattctttagctggaacccatatgaacggagccgtgtaaagttctcttccaatgccccaattaaagcaagccctcttgaaactatctgaggcaagccccttctccttctctgtaaagctttccgttcccgtatcttcttttacaacccacatggttttctcgttatcccatatactcacggtacagtttgcgttgtcccggctgtgtgtcctctgccagttctccggaccaatcacttcgtccaggatgttcatatcgcaccgagcgtctttatagagcaacaacgagattcctgattcttttaccgtcgcgatcctgcattcaatttcatcggcccgcaatgtcctaaacttcttcatctgctacgccctcctctgactcaactacacggctggcccacatatccgcaaaatgaagtatcatgtacagcggcgtctcttttcctgaaatttgatacttgaatggaccatacatgccattatgccagaggattgcctgctgctcttcctcggtcaaatctatgtactttgatatgatagacagggccctggcttcatgatctatatacaacagctcgggattgcttacataaggttttttatcagactggtatggcttcgggtcgggattcgctttcgtcgccctgcctttgagcatgtttggtacaaagttcggtttgccatactgtcccattttgcctatgtcgtggagcagagagcagataataacactctctatcaaacgactgtcggcatcaaaggcagctaccaaactaatcgcaatgttgcatacgttcagactgtgttccgcaagtcctcccttttttgatagatgatagctcgtactacacggtgccacgaaaaaaccgctctcttccatgtaattgaccagatttttcataccttttctacttgaatttaacaacaaatccttaattcttcctgactccatttttcatcctccaacatttcatttattttaatttcagcagccttccgcttccttagccgtcgttccttttcatcccggcagtcacacggctctcccggatctaagtgtgctccgcagtgggggcattcgttgtaatacatgcgctcaccatctcctttaaatcctgtaaatgctgtttgcagtttttgtatgtacgatcacttatacaattgaagttaaatcggtaatcgccgtcatatggcgcatccggtgaaaatccattgtcttctacacaaatatatagtccttcgggatagttactaatttctgctttcacgtacggatagccgccttcaccgtgtcctccacgttgtatctccagacacagacttaacaactcatggattttctgagcaatctcatcttgtttagcttgtgctactaattcaagcccgcgttcatcgaaaatccagtcttcgcatccacaaatcctatatacatatccgtcatcataactttggacttcgtgtatttgatttgtagttccgatatatttatccatactacccacccatccacaggaataatttgggatattactgccgtctaaaatttttactacatctccaactctatattttgcattcatcttgactaatcctcctatattgtttataataaccgtatctatacctaggcatgtcctcccttcaaagcggacagccggcgcttaatcgtctcgtggttaagcgcctttttatattccctgcaacacaggcagcaccacaaacagcgcgaacgccgtcaggcttacgatcagagttgtcccaagtgctatgtacactaagctgtcgtcccacgtggatcgccgggatttctttccctgccttctctttctaacaatcatgctgcttgtcctcctttctaccgcttacgcggtatttttcttctgttcatattccgatttttgttttctctggtagtagagagccacaagagcctctgtaagccgcttttcgcaaccttccgtatatgtggctgtacaggtgtattcttctttgcttctacccatgactttcacctcctcggttaattgtatgtattacggattgtcccggttgctatttctttctaattcttctatttccattaacccaaatagaatttcttttaatatctattcaacctcctatcccgatttcttatattgctttcctcaaaccaacgatttataatgtactaaggtgttagataacaagcttatttaaggaaggaaaactttaatgttaactaaaaaagcacaagaagttcttaactatttaagatcatgccattatgaaactgaaccaaaagataccccggataatattgacgaaattttttcagctaacgtctcttctgagctagacgaaatattagattatttgtctaaaaatgactacataaaattacagaaatatataaacggagcaaataatatcagtctaactcacaaaggattgaactatgaggattttgaaaagcttgaaacgccaattcaaacttttaatttcaatgctcccgtatcaaattccgctgttgggaactctgggaatgttaccataaataacggtatctcctttcaagaggctatatcctttgtgcaatcacaagaaatctcgcaatcagataaaaccgaagctattaaggttgtcgaatacattcaaacgctttctgaggctgatgcaccgattaaaaaaggcgctttgtccaaattcggtgaaatattaaacaaatttcactggctacccgaattagttatgaaattactctttacgtatttcaccgggatacaagtctaatagaaattttccatgcggtacgcaagactcaaaaacttcgtctcgagtaatgtttataccgtattctccatctttaaaaatcattgagaatgcggtaacgccgcttatttcttttccattcacttttagtacgccattatcggtatcaataaatacagtctttaacttttgcaccaccaacgccacctcctatcctgctttcttttcacttgtcataatctgcctgtccccaagtgctcttacataaataagggcttgttttctttcttcatccgggagcctggctaaaatttcatatatctcttctccttctttgatgtctttctgtgtaagttggttgttcatgttttcacctcgctttctgttgattacatttacattataattactttcagtaactttgtcaatactttttgttgacttgagtaactttttatgataatcttgattcaaaggtaggtgagcactgtgaatgaacgtatcaaagaaataagaaaaaaactgaaattaagccaagacgaattcggtaagcgcttaagcataacaaaagcatctataagtagacttgaatctggcgaaaataatccttccgcccaaacaatcaaacttatttgctctgaattccacataaatgaagaatggctaagaactggaaaaggggaaatgaaggaaaaaatcccttcagaagatgaatactttaaggctgctactcaaataggaagaagtaaggacaagcttgcaatgcaggcaattattgaatactggaaattagatgaagaaagtaagaaagtttttagagattatcttaataatatcgttgaaaaaagcaggggctaaagcccccgctctcattctgtaaggtttttaacaaccgtatagattgcaattaaaatctcttcatctgttgtttgattgaccatttcaattattaatttttgatattcgtccttatccatatgtacgacctcctagaagctatagcaaacacacgttcggaaattccttatacttataatactacatagtaccacagatatcaacaggaaaaatcgaacatattttcgcttttagctttattgggataagcgcttatcacttttttgtatgacttaattataccaattatggcccaaaatccaacccacttgtaataatccggccatattttgtaataatccagtatcaaaaaccaaaattaaaaaccgccccatttctgagacggttaaaggattctacctgccggacacaccggacgtgatagattctccctggacaagagaattatatcattcccgaagacgtcctgcaagtgggcgtatttttttaacccttttttaatatgttttagaggagatgataatatatgagaataggaatctacccgagaaaatcggtataccgcgataatagtgattctgtttctgtacaggtcaaaatgtgtaaggaatatgccggcattctataccgggacaaacaccttgaattctacgtctatgataaagacgagggatattccggtaaaaacacaaaccggccgtcattcaaggaacttatgagtgacgtgaaatccggaaaacttgatatagttatggtatataagttggaccgtatcagccgtaatgtgcaagaatttgcgaccatgtacgaaaccatgcagcagcacaacgtttccttcatttctgtcaaggaaacctttgacacttccacgcccatcgggagaactgtaatgtatattcttgctgcatttgctcaactcgaacgtgaaaatacttcggaacgtgtggctgatagtatgcgatcacttggtgtaaccggaaaatggactggtggtaagctgcctacagggatgtcgtcgatacggaaaaaaattgatgggaaagaacactcttatcttgtagtagataaaaacaaaatcggcttagtaaggacgcttggacagatgatattatatggaaatagcataacgagcttagagcgctattgcagggataacaacatcacaagccaaaccgggaaatatttgaatacgtctcagattcacggcatcttaacgaatccggtttactgccagaatgatttacaagcttattattatttcaaagataagggctgcactctgccggatgaacactattttgacgggacaaaggggttgatcgcatacgggcgaacgcggggaactacccagagaaaagaattatctattgaaaactggataatctctatagggatccatgattgggtattttcttctgaagaatttatcggaatacaaaatagacttgggcagaacaagcaaatccgaaaacaaaagcatgaagtcggtatactcaaaggcgtactgcgctgcaaatgtggccgcctgatgcataaccgggtatatatcaaaaacggtaaaatgtttgcgtattatttttgccaggaacgtgatcgaaagggattgcagtattgtgacgccgagtttgtaaaaatcaatgttatagatgaaatgtttcttgataagctgaaggaaatccgtctgaacccagaatatgtttatccggaaaaagaaaaaaacacgaccgatattgacgaattgaaaaaggaaatccgatcggtggaaaggtcattggataaccttacgatgcaactccaagaaaatatagcctccactgcatcgaaatacatcatctcgcagatggaaacattagatcgtaagcttgaatctttatctcgcaaattgcatactgaagaagtacggaaggttaatgagaaaactgaggaagaagagaaaaaagaaatttttaataatatctgcttctttcttgataattttgataagctctcctataaggaacagaatgaactcgtgcgcaagatagtgaaacaatgcgtattagacggaaaaagcctgagtatttcgttttaatatcattctaattatcattcatataggggttcccacctgccccatcatgtcgtgcccgagatgatttcttttataaccatacgttctggacacaccgaaatcatcatagtcaccgtacgggaacccttttgcaataggatgaaatgctttcagcccatacgcatctttatattttccgtcctcaccctgaatcttatacgttccgaccatgccgccgagcacggcttcataagcttcatggtagtattcataatactgcatgtcttttgtgagcgcttctatatcagtaccgccgtcagacagcttctctgccagctcttccatgtcgctgtccttatacccggaaaaatcgcccccatatttcgccccaagatatgcaagcagttcgatccagtccaaatgtggttcctttccgtatgtttccgcgtcatactcgtacgctttgtccagcgcctcacaggagacgttaaattctacccatttgatatagtcctcttccttcttctctgccacagcggccgtcttttccgcgtatcctcttccaaagagaagcgcggccgcgagaatgatcagaagcagctccgcggcaatgcccttcggtgatataacaaacttacgcatacatgctcctgtatatcggattcctaacagtctatgtcatgggacagttccatatgccgcccgtttgaatatattagtaaaaagagtatacacctaaagtcaggagcaatatccatgcacctaatatcatctgtactgtttgcgttgtctgccaacatagacactctgatcgtcggaatatcctacgggatcaaaaaggaacgggtaccctttgcggagaatattgtcatcagcctcataacatttgccggaacaatattttccatctatatgggacttcagctcaccttgtttatccctgccagtgtcgcacagcgaatcggctgcatcgtactgatcgtcctcgggctgtattatacggtaaagtccatgatcgaataccggcagggtaaactgccgccggacgactgggataatccggaagcagagccgccggataagaccataaccctgagagaagccgtactcatcgcctgcgccctcactgtgaacaacatggggatgggcataggagccagcatctcaggcatgaagctcatccccacctccattgccaccctgcttatctgtatggtatttctgtacaccggtaataaaatagggcgcatcggagtctcgggcgtattaaaacgatgggccggaccggtctccggcgtaatactgatcgtactcggattatacgaaatgtttctttagcgcttcagctctaaaaaataagaaccagaatgcacaacgcttcatctttccggttcttattactacatatctcttatcccaaatcccacatacacttatatgaaatgtaccccgcacctgcttaaaaaatgtctttgctccctgaaaacaggacaggctgccaggccgtctgcacaaaaacaacacggatgcggctgctgtgaagggtatctccgaagcagccgcatccgtttggcaatgtggcattttttcttttttcatactgctttacatgttctcctttaaccggtattttcttctgatgtatccgtttctgacttccgccggcttcctgccgccgtctgacaggacaggcccgcttctgtcctctgctgtgataccggcggcgctgcccatcccgccctttacagtctccgacggaagctcctttgcatcgtccaccgccttccagaaatgggtcagcgcaaaggctgcctttgaaccgaaccgcagctttccgccgtcctgttcctgcatatgtcttccggtacggaaccagtaccttgtaagcacataacagaagacgagtacagcagccgcaaaaataaatgtgaatataagatatgctgacatacaagccactcctttccgttcttatttattatattaattgtaagactttattttatataagtcaatattgtcagatatttaattttaaaaaccggatggaattataaaataaagaatgtgccccggcacattctcgcgccgagcgcggccgcttgcgccatattacatcttcgcgcgagtgctcctttcccggagggtttttataacatagggaacgaagtttcctttgttataaaaataaggctgccctccgccgtgcatgcacatgcacgaaagagagcagccttacgcctatattggccgtctaaagcttgccgtgaaatttgtctttatcaaattcagggttaaaataatagaagttcttgctgtccagctggtctttcgtcttctccagcgcctcgccaaaacgctggaagtggacgatctccctcgtccgcaggaacttaagcggctccctcacttccggatccgttatcatccgcagcaggttgtcatatacggtccttgccttctgttcagccgcaaggtcttccgtaaggtccgctatggcatcacctttggactggaattccagcgaagtaaacggaacagacgctgcggcctgcggccagagcgctgtcgtatggtcgatataatacgcgtcaaatcccgctgtcttagcctgctctatcgtcagatctttcgtcagctggtataccatggcgcagatgatctccatatgggccagctcttctgtaccaatatcagtgagcagtccgcccaccgcctttaccggcatcgtataccgctgcgccagataccgcatggaagcggacaattctccgtccgggcctccgtactggcttatgatcatctgtgcggtcttcggacaagtctttgtgatctttaccggaaattgtaatctcttctcatactgccacattatacacacgctccttcccagggcatcggccccgtctgccagcagaatctgccgtcttctttttttgcacagtaagggatacagtctctcgtgagcggatagaatttttccgcaaactgctttttcagtgtctccctctctgtaagcttctgctcgtacagactcaccgcctgttcctcatcaccgtgggtatcgaggtataatgtcagatcatccagtacaaaactgacctctgtcagctttgtcatcagttcttctctttctttttcctccggcagcttctggttcatgccgaacaacgcactcttcccgctgcttttgccattctcgccgtctgccgcaaaaaacggcatatccaactcgctgaatatcgtaccctcgcacagagcttttttatcatcgtagatttcaccatagtcctgaaccggcacgctggcgatggctaactgttcttttgacataattttctcctttcctgtaaatactatagctacaatgttagtatctgcataaaaagaagagttatattggtaattttagttacaggacgagcgtgatccttgtcccttttttatacacggaatgtgcgtccagcccgatcttcagttctcccgcgatctgagccgcaagatacagccccataccgcttgatttcttcctctgcccgcctgcgtctccggagaatcctttgtcaaagataaacggcaagtccgtctcctttattccggttccattatcttctatttccagcaccagtttcctgtctgatcctgaccggcgcaatgttacggaaagttcgggacgaatttcctccgttctcgtatatttgatggaattacccatgatctggcttaaaataaagcagagactttttttatctgttaccacctgctcatcggaaatatccgcctctatatgaaagcctgcttcatgaatgagcatctcatattcatccagcacttcaccgacacattccgccacactcactttctccagcagatagtctttatgcaccgctttcagtcttgcgtaaaacagtatctgctctataaaaccatgcatctggtttctcgcatattcaagccgcttatggatatccggaccgatctcattcctccggttatcaagaacaagtgtcatcagcgccagcggcgtcttgacctcatgcgcccacgtctctatgaacgtttcatattcttccagacggatcacctgctcctttatgcgttcttctttttggcaaagcagctgcgccgccagccggatgtgccgccgttccccggcggacaggcagcggcagagctgttcttccatctcttcatccggactgcccagatattccggcacaagcttactctgcctcacctccctgcggtacgtacacgccgcggccgcggtaaagagaaggacagaaaaaaggaagaacattccggccagttcccggaacgcgcgtatgtctgccagccagagaaaaagtccaaatacagtgtccgacagaagaagcagcccgagccataatttgtggtccatacagatatcccggaatcgtctaatcttttccatacgcatctcctttggcgatccgatagccaacgcccctcactgtctcgatccggccgtcaagaggcaggcgtgcaagtgttttcttaagccgtgtcatattgacctgcagcgcattttcatcgatatattccgtcgtgccccagagcgcgctgctcagttcctcttttgtgacggtcccgcctcttttcatcataagcttctccatgatctttccctgattctccggcagcagcacagaactgcccgacacatacagtgtatacgtccggatatcgagcgtcagttcccccaggcgtatctcctgttcccttccctcgaagcgtcgcatgagattttccgccctggcaagaagccgttccttgcggcacggtttcgtcagatactcatccgccccgatacgcagcgccctcagttcatcgttcagatgatttctggatgtcagcacgagcaccggacagctgcttcgctccttaagctccatacatatgtcgaacccgctcttgcccggaagattcagatccaatactacaagatgcggggcgtaccggaagacggccgcggaggcgctgccaaaatccgtaatgcacagcacctcatacccggccttttgaaaaatatattccagttcttccctcatgtacgtctcgtcttcaacaattactatctttttcacgtaactttcctcatttatatcctctcttttgccggccggaccatctcgaggatatggcgtctgcccgcccgcatcacaatagttatatacacatactccacgatacacagaagccccgctgccagaagcgcggtccaaaacagaacgccggcccttccttcaagcgctgtcgggaggatccccttaaacagagaaccgatcccaaagatactgcttatgaccgccgtcaggaccgtcagcgcgaaataccatctgatctgagtgtccagagagcggcagaccgccccgctgtcactgccgagcatgatgagcatccggtaacgcttcccgcactttttctgctgcatcagaaactgtacccctatgactgtattgcctattatgagaaatatggccgccaggtagaggctcacataagtggaggccacattgtagaacatctggcgccctatgccctgcagataggactcatattccaggtctgtctttttgagcaggctgttgacctgcatcaccgcctggagaagtcccttttcttccacaagttctctttgcacgtaagtattccagtacacattcacttcttctcctgcaaacagcctgtcaaataccttatccgggagaataaggccgaggctgatcgtgatgaggcggtcggccaccagattttccgtgcacagtgtgccggtcaccttatgatcctctccgtctatcgtaaccaccggcctcatcctgcacacttcatccaccacctttttatacgcgccgtcagagtaatcagcatcggtataaaacgcagtctcattgtcactgaggcgaatgggagcctttcccgccatcttcaggatctcattatatccggacagtgagatcacatacggagaagtaaaataacgcagattatccttaaatgtttccttctcctcagagtccttaagcttatccgctgcctcaagcagctgttccatgccgaaggtatgctgtctgtggcctgtgccctccggttcctcctcggtaaataacagccctgccttcacttccgacagtcccccgagcatctctttaagttccggcgccgcaagctctcttctgatatccgcttccccgccggtaaaggtaaagtctgccgcatgtccttcctctctccccgccgcgcggcccatggcgataccataggagaagcacacgagcgccataaggatcaaaagagaggaaaccgccatagatctatgcttcagaaatacattctcctgaagctgcctgcatgtaaacgtataaagacctttcttctgtttctttcggagcatgacagcctcaagccgtttcccaagcccggaaaaaagcagaaatgtgccggccgtgccaacgatgaccgtaacggtcattgtccgcacatccctccacgccgttcctgagagcgctgtgccataggcggcggccaaaagcagcagacctgccgcaaaccgcaggaccggggatctcccctgttcctcacgccgcttttcctcctgtccctcttccatgagcacgctgatctcctgccgcgcgatcttgccgctcagtatgagaaaggccagaaactttaccccgaaaaaacccgctgccgtccagagcaccgccgtcaacgaaaaggacgaccgatgcccgatgataccaagaccgaccagccgggaggttatcagactgatcatctcggagaggaatacggagagcggaaggcctgccagcagagccagcacactgttccacatatcttccgccataaggatgccaaacagcctgctcctcttcatgccaagcataagatagagcccgaattcatgactcctcctctccatctggtattttcccgcaaaataaacgagaaagaatataagaaacagtgaaaatccgtacagcacggacacaagcccgagcagacggtccaccgcgtcactttccatcgtgtgcagaaactgcatcacatcctgattctccagtgacagtatcatgtaaaacaggacgaccgccgcagtgagggagccaaagaacataccgttctccttccggtctctcctgctgttccttccgaccatattaaaaaacatccgcgcccccccctaactgtgccatggctgcaagaattctttcataatagttcttctgggattcgtgcggaaattctcttctcagttcgtggaaaatgtaaccgtcctgcacgaacaggatgcgggaacaatagctggccgccccggcgtcatgggtgaccatcagtatcgtccggccaaattcacagttcagcccgtgaagcttctgcataaggactcttgcattctgtgtgtcaagcgctccggtaggttcgtcggcgagaacgatctccggatccaatatgagcgctctggccgccgctactctctgcttctctccgcccgacatcccggcaggaaatttgtcaagcacctctcctatttccagataatccgtaagctcggccagtctggccgcgccttcctcctcgtctatatggcggatcgacatcggaagcgtgatattttccctcccggtcagattatccagcagttcaaattcctggtacagataaccgatacggctgcccctgtagtctgccagctgtctgtcgctgaaggcgcctatatccttaccgtccagaaggatcttgccctctgtcggcttcagcgcggtggcgatacagttcagaagggtcgtcttgcccgaaccgctctttcccataatgccgaggaactcccctttcagtacgtcaaaggtcattccattcagcgcttttgtcctgttgtcatgcttcccaaaatatttgcgcagtccctgcacctgtaagattctctctttcattatcctcatacctcccatctaacggaattataccgtacatggcggcacaaaaccacttacataggatgtaaggtttgacgggactttctccattaggctctccagtctgttcacatttttatccgagtgctccacctctcttgcatagcggtatacggtctcgactatgtcctccgtatccagtgtcttttcgttttttatccagcgcgccatgagcatctcctcaatgatcatacggctcaccgcggccagcttcgcctttgcgctgatccggccgtcatagaccgcgccgcagaaatacacggagataaaatagacgagtatctgctccgactgtatctcccacatcggcatatatcttttcatccacgcgccaaactccagacatgtcgcggcatagcctgcgtccgcttgagaatacaggagcgctctcgcctcatccagacagcttttccagtcttcgcgcagaagctccagcgtgtcaaggaaggcaaacatcttcttcataaaacaaaaccgccggcccatccgcgcttcattatcccccgctcctcccggcttcccggcagcttccgctctgccgggcgcatcgaatagttcctgacaggagaaaagagttccttccaagtagtttttctccacctcatcggcaagggcaagcattctctgttctctcgcctgcgcaggaacagcgcggttttggaggatatcaaggatcacttcccttgcgtctgccagcgccgaatacagcagcaggtcgaactcttcatactcctcctccccgtccttttcacaggcaggaaaagccgccggttcttctctgttcatgaggagcctggccacaacagggcaggacagcgacagggtgatctcccgtatgccttcaaattcctctatatgtctcggatagagacggcacgtcctgcacagactcttttcaccgagttctgtatacatatcacacaagttgtcctgattgagaaacacacagcgctttccttccttctgcctgaatatcctctgacgccacctgatggacctgcgcagcttcctccctgctcttcccttcagccgggcatatcttccaagggacctctcatctatctggatctgccatcccgcgcagcacgtatcctcgcactgccccgccgcgcaacggaactggcggtaataatctggtattgtatatcgcatatctttcctgtcctttctagctttttccaaaatctgtcgacataaacaggcttttcgtatttggtacattttttcagcagctttataacacgatagacacgatcatcgtcggccattttgtcggtaaagaggcgcttgccagcgtgggcggctcttccactcagatcgtcaatctgatcgtcggcttctttaccggactctcctccggagcgtccgtcatcatcgcgcagttttacggggcaaaaaataagcacgccctgaacgagagtcttcacaccgcgtacgccttctccgccgccgggagtatcgctatcggaattctcgggtttgtgcttgccccaaggctgcttatgtggatgaatacgccggcagaactgatggcggactccacagtctatctccgcatttattttgcagggatcctctttgtcttcatttacaatatgggctcagggatcctccgcgcttcaggggattccagacaccctctgtactacctgatcgtgtgctgcatgctgaacatcgtgctggacaccgtatttatcgtcgtctttcacatgggcgtaaccggcgcggcggcgccaccctgctttcccaggcggtgagcgcactgcttgtgactttacggctcacccgggcagaaacgatattgaagctgtcatttacccacatccgcatgcacggcccgatcctcaggtcgctgctgcgcatcggactgcccgccggcttccagtctgtgatgtacaatatctccaacacgatgatacaggcatcactgaacacattcggaaccgacacgtccgccgcctggtccgtgtacaacaagctgggcggccttttctggatgatgagcggcgccttcggcatagccatcaccacctttgtagggcagaattacggagcaggaaaaacagaccgggtgaaaaaaagcgtccgcgtctgtctcggcattgacctgctcttctccggaatcctcgtcgtcttttttatagtgctccgcgtccctctctttggcatatttacgtctgacccggaagtcatacggcttggctcctggatgcttgccctcatcacgccgtgttatatcttctacgtgtttctggaagtattgtccggcgccctgcgggggatcggagatgtcatcataccgctcatcatcacgatgtgcggtacgtgcctgctgaggatcatatggatcgccggcgccctgaagttccgccccgccgtagacacgataatcttcagctatccggtatcatggatcatatcagcccttatgttcctcttttattattcctaccggaaacgaaggcttgtataaggcaagccattcctcagccacgatccgggcgcctcgtctgttcaggtggatcccatccactgtgatctcaccggtcccttctgcgtccgcggcacggttcagcacgttgtggagcgggagaaactccgctccatatctcaatgccatcttacgttctatggcctccgcctcctcaatgacaggaaaccagcggcggtatctggccggttccgcaaatatgaacggtcccatacagagtatcctggccgctgtctctgtccggatccttctgatgagccgcccataattttcttcaaacttctgctgcttcagcgtccttttggtatgcatctctatccctgcgtcattgcagcctatcagcaccgtcaccacatcaggggcggctgatatgcagtcggcatcgagcatcctcagaagtgccggcactgtaaaaccgtcatgtcccttattgacgacacatactccccggtcctttatccgttccgctattatgcggacataaccatccccgaggctgtcaggatccccgtccaggttatgatctgcatctgttatactgtctcctagaaaaagcagctttgtctgtccttccatactgtccgcccccttctgtcaccgcaaacgtctgctatacgcccgcttttttgcagatatcggccagacagcatttgtcacaaaatggtttggtcctcgccgtacatacatcccgtccatggtacacgaggcggtggcagaagtcgctgccttcttccggcggtatgatcttccatagctccatctctaccttcttcggctctttgatgccgtcgacaaggcccatccggtttaccagccggatacagtgtgtatctgtcacgatcgccggctttttgaacacgtcgcccatgatgagattggcgcttttgcgcccgacccccggcagctttaacaatgcgtcaaaatcgtccggtacgttcccgccatactcatctctcaatatcttcatacacgcgctgatgtcacgcgccttgctcttaccgagcccgcatggcctcacgatctcttcgatctcctccggcggcgccgaagcaagcgcttccacatccggatatttttcatacaggtcctccacaactacgttgactctggcgtctgtacactgtgccgccagacggacactgacaaggagcttccacgcatggtcgtagtccagcgtacagccggcgtccggatactccttctttaaacgttcgattatttccagtgctaatttcttctttgtcatactcttcctctttttttcatcagttctttgtatatctgaaggctttcgtcgtcaaacaggacaaatattaccttctctatctttcccgggtgctcttccagataggactgaaccgtatgtaccgcgatcccggcagccctctccttcggatacccatagatacctgtagatatggcaggaaacgcgatggacgtgattcgtttcctggctgctgcctccagacagttccgatagcatccggccagcacctcatcctccttcttccccccgcccctccagacgggtccgaccgtatgtattacatacctgcccggcagacggtagccgccggtcaccctcgcctctccggcaggacaaccatgaagcgctctgcactcttccagcaggccgggacctgccgctctgtggatcgccccgtccacgcccccgcctccgagcagagaagaattggccgcattgactatggcatccacatctgtaagtctggtaatgtcaccttttattacatgtatcatggtcatcctccttttctgtatagtggtttccttttattttaagctctgcccgtcttaatgtcaaacgctaaaccgcgcagaaaggtaatctaaatctcacataatgtaaaatatagttgacatatcatcaccataactatatactgaaatcaaaggaggcgggagatgaaaaacaagaaaatgaaacttgcgaggatcaatatggatatgtcccaggaagatcttgcaaggcacgtggatgtcacccgccagactatcggtatgatagaggccgggaagtttaatccgtcgctcagactgtgcctcgcgatctgccgggcgctcggtgtcactttaaacgatttgttttgggaggaggaggaatatgaaaaaaacagtcgatgaaagacaggaactggaattgatgaagatagaacgggctggcttctgggtattattctttgcccttaccgcggatatattacttaaggtactgttctttcagattccggtgcgggagcttatcggagaacacatcgcgttttttgcgggctgcatcacgatcatagccggatgcacaaagagggggctgtggacttattattctgtcccctgtctcagggattatctcgttcacagccttgcggcgactgtgatctttactattttgtttgccgccgccatggctctgcgcggtgtccgtcatctggcaggaatcacgctggcctttgccgtatttatctttctgctcatgttcggagtgctggccgccatgggggaatacacgaaaagaaaacagaagaaactggatgacacatatggggacgattagagtcaggaggtaccgcaatggattttgaacaggattatgtcatgaggctggtcaaagacctggtgcgctttctcatgcagctcatcacaggtaagtctcagttccggtatgagacagacgccgaagaaccatccccgtgcggcgacgactatacccgcatcatcgcaatggctgacgcgggcaggataaacgaggctgaaaacctcctctatgagaatctggatacggataacgaagactatctgctcatgggcctgtccttctactcacatatcaatgattataaagatgattttctgctggaatccaactattccagagaagagatcaaagatggcatcgaaaactttgtaaaagaatacggcgttacaggacttgaaacgttctattcttccgccttaaggctgatataaatatgaatctcagtatgcagtagctcaccttttacaacaaatcttgcatatttttcccgccggaatgtgctttacggcagcttccggcggaatctcttctgccagcgccggcagatacatcttatcagtatcaacaggacacctgtatgttatctttgaaaaaaaatgatttattgtcaattgcccgcatggtcgctaaaatcccgtccagatggtcgaattcgtgctgcagaagttccgacagatctccttccagcctcatgctgcagtcttcccacttctcatttttataatgtatgacgcaccgtttacggcgccttactttcacgagcagccccggaaaagacatacagtcatccatcacctctatgtactcttcatccggaaattccatgaatgggttgataaatacgaccgggctgtctatatgcatatacagaatccgtttaaatacccctatctgtggtgcggccacagctcttcccgcttggtatgaagcgcggaagtccattaacgtatcatgcaggtctctgacgatcggtcctatgttgttaagctcctcctttaccacttcttcgcttctctcatacagccttggatctccaagcatcagtatctttcttatcatgtgatctcctcctcatgtttcatcttacatctgtctgctgcagcataacgcggacgaaaacgtcctccccgcccgatgcgagattctctccgcaggcatagacttccccgtctgtctgctggatgtaagtctgatgcctgacataggaaagcggctccttccggtcatagagcggatactgctccggggagtcatacagaagggcgtccgcccagacggatttcaccttctccctcacctgcaccggttctgccagaaccttctctttggccgccggcaggccgcactggccgtaggagttatccccccatgtccagaggacattgtcatcgctgatggcagccagcgtattttgcccggctgtgacatacttcatatgcgacagcgtctgttccagcccattgtatgagacaatcccggcaccagataagtctttgaccgtcccgccgcaccagacggttccgtcctccttcagcacggccatcgcctcctccgtgcaggccgcgaaccggacatgatccatcagcttcgtaaccttcatcttcccttcggttcctggtatatcacctgttccccagagctcattctcttcatttataaacagcataaaatacttgccaagtgcaacatgctttacgccgtccgctatctcgtacgggggatagtatccccgggcattgatatgccctttagtgtctcccctcccgagttcgccgtgctcattggccgagattccgtacaaaataccgttttctatgtaaaatctgctgcttaagttcactgcgttgtcacagtaacagtcctcaatgcgcagttctctgctgcccaggtgcagcgcgtccttatccggcgtatccacatacggaactgccggcacaccatccgtcttctcttcacttgtgccctgcctctcctccggcgcagtaccgcttttgaagctctcacctgttctcaggggatgtgcgtgataattcaagattatgaggatgataaaaagcaactgcacaacaaaggagacggcggagcgtatctgctgatttctgaccgggtccgcagcatcgatataccggaagccgtccctgcagtattttttcagacggccccgcagtacagactgctcttccccggacatatcacctttgaagataaactgatcattgacggcaaaaaagcgttctccttctgtcacactttccagcttgtcaagcggcagcccgatcaccctgttgtacgtgtggatcacaagctcctccgccgacagttccactatcgtctttgcgtcctgcggccggtttgcataattcttcttagtcgcctttaaggtaagccaaaatacgagccagcggacaagtataatcagcatggacactccaacgatcaggcacatacagaccatcaccgtcagcataggattccttatattcataaagaaaaccgcagctgccagaacgctggcaaatcctgcccttttttctgaataataataccggagccggtagagcatatacatggacgcacattctactgcctgttccctgtctccttcgccccacccgatctcaatgcaaagcggctcatcttccgggagaagcccgcacgtatacttatgaggacagtgcttcttcatcttgtttctaagacagagtatcccgtctctgccgagatattttttatcaagccgcagcccggccgctcccgaacagatatcaaaatatgcttctgtctcacgcactgctgtgatatccgaataacttatgctttccttgcgtccatccccgtacgcgacaaaaagatagtccggataaaatgttccaacaaggctgctctgttcccggcttctgatcaacgcggccagttttttgccggagcaatgataacaaagccggacgataccgagcaccacagcctctgccgccgctgccagcgccatcatcgcaagaaccggacgccatcctgccaggactcccactgcctgcagcatcacagcgatcagcagcactccgtacccggccactatgacgaaagcgtctatccggttcttctggcatttttcatatttctccctgtaattgtccggcacagtatcgtatgtaaattcgtccatcttctccaactattgtccctcctgccgttcgcccggtacgaaatatgagtaccccggatcgccttctgtgtcaagctcctttttcactgccggggcatccagtccggatgacccgtctgtcccgtaaggaacctgatacgcgagatatacgccttccccgcgcatgagcctatagctggccgtcatttccagctcttccgcgtccttactgtaaggatctgaatatacatctgtggaatcgatctgaacgagacagtcgtacttgtcgcctgccagcagctccatatgtgtgatattgcgcgtgacatcgattccgttcactgtatactgcctgtcgttttcttccagcgccagccgtgccgcctgaaatatatcgtcctgcccatatgccaccttcagatacccaagctggctggagcggaagtcggcaagagccgggtcttttttcagaatctgtctcatttccttcgccattgtcttgccggacgctgccgcatcgggcgctgctcctctgtcactttcaaatgactccggagcctccgtccgtgtaaaatgcatgggagctgttttctccatagataccttacagagtgagatcgtaccgccgtcttcgagaaaaacgtcctcgcctgccacacaattttcatccagcactatcgtccactgcggcagtccttcccggcacagggcgagagccagcgttccaaactgtacgcagtcttcaaatgcatatgtctcttccactcccccgtctgaccgcacgaccaggccgtccgctgtcgtcttgatgctccatccggcaatatttttgccctctcccgtccagcttccggtaatgagattgtatacgtagggcgtggtgatcccgtctccccggtcgccgtaagtcatcacatactcgtgcacctttccgtcatccggtgactggtacgtgactgcacacgcgtcatctgccagccactgaactttcatgtctttcccggaagtgtacgggaactggtctgaccttcttgcaaaccagaggatctgatcccggtatgtcgtcacacggcccgacgtctcttcgtattttaatatgagcatatgccggtagtccggagacaggctccagactgcgctgcgcgccttcacctcacggatacccgcggccccggcggccaatatgatcacacttcccgccacagcggcgccgacgcgcaccgctttcttctcccgccagatgagtgcggccgcggcagtcagcagaactgccgccagtatattgacaaggtacggcagaaaatctgagatatactccataccgtattttttcccggccgtcacatatgcgagctgcatgcacaacagcagcagcgcgggaaccacgcagatgaccgcggcggtccttcttttcttctgcccatgtccctctgtctcccggtacataccgctcttttttcctccggcctgtccgctgtactcttctccgtccagcagttcatccacactgatctccagtgtacggctcaattccttcagcatgcctacatccggaaggccgcctcctgtctcccatttggatactgccttgttggtgacaccgagccgttctgccagttccttctgggtcaggcctgctgcctttcttcttctggcgatcaactgccctgttttcttattgtccatactctgcctcccgtctgctgccgcttcttagccttgccagctcctgtctgttatgataacaaaagctgttctcattacaatacacgcattgttctgcccggtctacgcagcgtggacctgcaccggtatacgccgttagatcagcgtttcccgtttaattcataataaaaaatatactgctgcatcaccccccggtatcctttataccgccgcttcggaaagcctctgcggtaatgggctttcagcgcctgactgatatgtgtgtccaccggaaacgcatccaggtgatgaagtccgaacagacagatacagtccgccaccttatcgcctactccgtacagcttcaaaagttcagccttcgcctccggataggaaagcgaccggatatgatccaggtttacttccccgtacgctatacttctggccgtgcgcacaacatatttgctcctgtatccgagattgcattctttcagggcgtcttcctcaagctccgccagcgcctccggctccggaaaggtataatagacgtggccggacgcactttctcttttctctccgtacgtttcacatatattggagatacaccggcggatccgggtgatattattttgctgggagatgagaaaagaagccgtcatctcccacagatcctgccgcagtatccggatcccgcttccaagcaaagccgccgatcttaaatagtcatcttttacgtcgatatttttgatatatgccccgtagtcttcatccaaatcaaagtagtgccgccagaagctctcgtactcctcttctgcgcagcagaacgtacagctctttccttcctgtgtgatctccacataccgtcctcccgccacgacggaatatgtactgccgtcaataggctccatgcggaagcactggccggagatacagatctgttctatattaaagttgtctgtctctttcgtaaccatatgtatgtctgtccctttgtcctctcttctttaaccttttctgtctcctatccggctgccccgccgttatctttcaaaaacacgagcgtatcctcgccggaatactcttcccggtaccggtagcccagccggtcaaacttccggatgtcgtccatgctgtgtgcttcgtgttcggcgagaaaacgtaccatctcgccgcgggccatcttggccggcgtccccttttcctttatctttccttctgacagctctccgaacacgcacgtcacaaaggtgacgccgtcatgcagatatcttgtaatgcattcgctgtattcctttgaagccagattcagaataaccttatcttcctcaaatatgtccccggccatcgtatccccccagtattcatacagcgaatccatctgcgggcagtctccgtgcctcccgagcttagcctgcatttccaggcggtacggaacaacaccgtcaaaagggcgcagcatcccgtaaaatcccgagagaatgcgcagatgttcctggagataggcaaacgtcctgtcctccataacagcaggggccatatactggtactggatcccctcataagaaagaatggcgggcgtcaggcttttgtacagatccatgccgctaaaccgcctgaagttcagttccgctatcttatcattgcatttccatatcgctttgcactgctcatatgtgagtgacttcatgtattccatcaagtattttgttttatccatgtacggcggcagatcatgacatgcaaatacatctgtattcacattcattttcttcgccggtgaaatgatgatccgcatctgttacttcctgctttctattttttcttttgctttccgcctgcttctgcccttcacctcattcagaaaggcgaacccgatgatcattgcccctcctgcgatctgaggcgcagtgaccgtctccccaagtacgataaacgagacgagtatggccaccatcgggtcgatataacttaagatggctgcctgctgccctttgagccctgtcagagaggcaaaatacatgcagtacgtgattcccgtatgtacgactcccactatgagcagcagcacggtccctttcgcgtccagaccggttacggcaaaaccgcatgtaaatataacgtaaggaaacatgatcagcatggctgccccaaactggagccatgtccgcacaagtccgtcgatatccccgagcgtcttattaaaaaatacgacccctgcgtagcataccgccgcgccaagcccgtaaagcgcccctgccgtatcgttgcttccccctccgctcactcctatgacaagcacgagccccgccgtggacgccgcaaagcagactgcctgccttaccttaagcttctcccggaatatgagaacactcgacaggacgatcagcgtcggggcgaagtagtagcacagggtagatacggccacacttgtgtaccggtacgcctcgaacagcaatatccagttaaatgccaaagccgccccggatccgagcagtatgaggatccttcccttcacagccctgatctgcttaagtctgccccccgcggcagccgcgccggtgagcataagaaatgcggtcacagccctccacagcgctatctccgcggacggcagcggaatattcttcacaaaggccccgatcgtgccgaagatcaccatggacagaatgatctgtattctcgccttattatttgaaagcattgtagaactccttaagctctgctttgacctccggcggaagatcgcgcttcttgatccccctgacggccccctccattccgagcagtctgtgaatacatgcagagtcgtctatcgccttgatcttaagccaggcctgtctgcttcctgtctccctgagctgctccgccgtcataataccgacttcattcagctgctgctctacgactggtcctatattcggcagtttggacaattcacccatattttttcttcctcctttcgtcctgatcactgtttacattatacatcatccgtcccctctcctccacctgaaaaattctccatgataaaagacaggcggaaacctgcccggtttccgccccatatatccctatcctatattatctgccgtaaaatgctttcaccgcctccgctatataatccggagctccgggaccgtactgctcttccatggattctttgagaggaccgctctttttaaacgcatctgccatctcaagcagcagctctgtcacatctttcatctgatacagctgcttcgatacaaagtcatattcccctatcagctccttcacttcaaatgtattcacatccgtccctgccttggcggcgatcttccggtatatcttatcgatacgcttctggtatgcgtccatgactccggaaccggcaggattttttgcggcgtccagcgcctcttttctgccgccgtaccactccgtcactttctgaaggttcttttgtgcacgcccgctgccagctttttctataaactgttcctcgtacttttccaggcttccgtattttctgacaacggcgtcaacctgcccgctctccatatttgataccatcgtatcatatagttcttttatctcatccctgctgaacacttcaaaatccatctcgttctctcctttcagaatgccatctatactggatatcaaacgctcaagtctcgactttttaacctccagtatggctctttgactgttcaatactgcttctctgtcaaagtcaggacgttccatcgtcgctttgatatccttaagcggcatatcgaattcgcggaaaaagagaatctgctgaagtgtctccagtgccttatcgtcataaagcctgtatcccgcctctgtgtaagctgtcggcttcagaagccctatcttgtcatagtaatgaagcgtgcgcacgctgatacttgtgattttggatatctcgttcactgttctcatcttcccgtctcctcctgctttgataatctcactgtacagtatgaccttccgtcagggtcaacagaaaatctgcgtattttacagatcaaacagactgagctgccggactgtttcttctttcttctttttatgcgcctgttcccttacgatcaggccggccggcacatcgttcagaaattctgattcctccccggagcaggtcaggataagttcttcttttgcccttgtcatgccgacatagaacagccggcgctcttcctccttgtccgccggatgccgctcgctttcaaaaggcatcgtcccccggcgcacgccaaagatgaggacagccggaaattccagccctttggagccgtgcagtgtcatgagcgtgactgccccggagctatactgcctgtccccgcgccgtttcaggtcgctctcaacgcccaggctcagcgctttagaaagctcttccatatctttataacataccgccatccccgacagcttcttcatcgcctcgttgtctgcagcctgtatatcctgtatccattgttccagaaacttctgcggcttttcctttgcatacagaggacggtatttctctgccatgcgctcaaatacttcctctgataccggattctgctccagcccccacaaaagcttcagcccctgctctctggcgtgcgtatcgagcgcatccgcaagataccggaaaaagaaaagactcccccgcacaatatcctcctgaagatatgactcacgtccggccacgatatagggaatcccctctttcttcaggcacgtttccagaaggtccgcttcccggtgtgtgcggtaaagtaccgcaatatcgtcaaaccctctgactttcctctctccccgggttccgtccatctcgtgcgcctccagcattccgatccctcctgccagacggttgatctcctttgccacaaatatcgcctcgcccatcggcgtccccgccgcggccagtctcactttgacgcctccttcacagttggcgcgcagcgtgcgctcctcccccggattgccgcagatgagcttaatggcaggcgccacgatctccggtgtggagcggtaattttcttccaggcggatgacctccagatccggatattcctcccgaagccggtcaaagcaggctgcgtccgccccgcgaaagccatagatggactgatccgggtccccgatgacaaagagttctcttccgccttcattccaggccttcataagcctgtactgcagcggattgatatcctggaactcgtccacgagcaggtacgcgcaacgcttccggaagccgtcagccgccgcgccggcctccatgaggcacagtgtctcaagaagcaggccgtcaaagtcaagaagctttctctctttcagcctgcgctcatattctctcacctgagggctcatttcttcctcagaaagcgctgcagatttctccctggacacctgctcaagaagctgcttcccggtgatgtgaagccccgactcctttgccgcctcagcggcgatctcttttgcctcagtctcatccgccagtgaaaaggaaagcccctgctccttcagaaaggcaaggcagaccgcatggaacgtgcccgcctgcatcgttcccactctccgcctgccgccgagctgccgctgtattctctcccgcagctcccgggccgcctcgtttgtaaaggtcaccgccgttatctcagacggttttacttttcttcgttccagaagatacagaatatgggagacaagcgtcttcgtcttgcctgtgccgggtccggcgataaccgcggttctgcgcgccgctgatcttacggcactttcctgccccggatcgagccgctctgtccccggtatctgttcttttgccttttgttctttttgtttctgatcttccttccctgtctccttctcccccggccgttgttcttctgtctgttttacagccggtcccggcggcactttattttccgcgcccacttcttttacgttcatgccgagcatgtcaaagaagtccatctgcccgcttgtattctctatctcatgaggttcaaacagtctgacagagccgtattccccgtcaaagcccggaatgcgctccacatctcctctgcgcagccgccggatcccttcggcgatcaacacaccggacgcggcgcgtatctcctcttccggtatcgtcctcaatatgtcaaactccggtccgagacgtttcagcatgctgaggtattccttctgcactcctctgctggcgggagcatgccccaccgaagcgccgatcacctccggcagaggcacgagactctcgaacattgcggcgtcctttcttctgtacccttcctcccggtccgccagctgttccactctgtgggacacgccgatggtgatcttccgcccgcagacaggacagatccccccgtacttttccgtctccgccggcgtcagacagaggccgcattttctgtgcccgtcaaaatgatactttccctcctccggaaagaattcaagtgtgccgcacagcccccgtccttcctgtaccgctgctttcagtccgctgtaggacagttcgatatcaagaaggttcgcctctctcccaagctttgccggagagtgggcgtctgagttggagatgagctgatacctgtccagcgcggagacgcgccagttcatgggcgggtctgaggaaagtccggtctccatggcatgaatatatggggagagatcctcaaaacattcttccaccgtgtcgaagccggaaaatgcgccgaacagggaaaaatgcggcgtccagatatgcgcaggcacgaggacggcgtccgggctcagttccaggattatctccagcagatcccggcagtcaagtccgaggatcggcctgccgtcagaatgaatgtttccgacagcctcaagcttttttgcgatggcctcggcggcttcaagtcccggcagaaggatcacgttatgcaccttgcgcactctgccgttctttttgtatatggaactgatctctccggtaatgacgaaccgggggatatctcctgccgcggccgtctcatctttgatgcggtattcctcctttaaaacatacagcccgtcctctgcgggaacgagcttctcttccagctcctctctccaggccggatgggtgaagtcacccgttccgacgatatggatgcccttgcgcctcgcccacatatcgagtgcttccggagtgcagtctttgcttgtagcgcgggagaagcgggaatgaatgtgcagatctgctatatacatatgaacacctctttacgtatttcgtctgtcctttttcttttgtatttcacaccttacatctatgcactattatatcatgactgcacgtatccgttacatacgaaaaaccatttcctataataaagggacgtccgtctccgcagatcagcagaaaaaggacaaaagcagggcggggaatcatacttccctgtcctgcttttgtccctgccttctattcagatcccgagtgtttctcttgcctgatccagcctgctgtaaaactcattgtagaattgttccgtctcgtatgctgtctgataaaatgtcttcagtacatacaagttcaagatacgcgcctgttcttcgtcaagcgtctcagcagcagcctggcagtctgtcagaaaaccgtgccagtctgccgtaaactgctcatacgttttaagatcaggcgtgtccagccatttcttcacttttatcttgccgcggtcttttttcctgcattcatggatctgaagaaagtatcggaatccctcttcttcgtaataacgtccaagcggaaacagacggcatatgcccgggcggaaggcgtggatgccgcaccggccgctgccgtccaaaaaggcgcacgcttcttcctgtccgttcatcttaaggttcggcacgatcatgccgtccgccacattcagctcaatataccgttccatcagtcctgcaaagtccgcagaacatccgcagcacagtctttttatatccagcggatccagaataatggaactccccattcccctgcagcaggccgaacagccctcacagtcacggcagtctgccttcaccatatcgttggctgtatacagtcttccgtctgatatatcctttaagtctacattacgtttcatctgctttactgctcctgtcagcgccgtaaccggcggtttttattcgctcccacgcttctgtattgtgcagaaacacatactgttcgtcactttccacagcggctatcaatgtctctctcattctggcgccgagccggtcttccccttcctttttcttcacgtgccggtagaggggagaagacgtataatcccactgtccggccgcggaagtgagcattttctccaatatttccagacagttatccctgtctttcctgtgaacatacagttcaagccacgggatacctgctgtatattcccacatatccagtgcttccgccgctttgccggcagcctctgccagataacgcgcgtcctcctcccggccttcccttaccgcgatctcgatgagtacggagaataccatgctcaggctgaccgccgcctgcatcagttttctttcttcgatctgcgcggccttcgtcagttcatttctcgcaaggcagagattgacctgcatctgccttttgtcaaaggcctgttcctccggcagcccgtccagcagctcttccaccctgccatactccccccgcgccatacaccctgatgcgagcatgtaccgcgcctgatcacgcaccgccgtgtcttcgcttcgggccgccctctcataaagctgcccgatcctgtccttatactgctgcgcttcttccgggtctttccccatcgcgagtgctccgcttaacgccatcgccccattcagcaaaaggatatcgcttccgggatattcccttattttttccatgataaactcatatgcggcctcaaacccgctgcgaaagaaaatctcagacatctcattgacgaccgcggctgcttcctgttccgatatcttttcatgaaaagaaagcagggcatttaaatctgtcttcaaataccttgcaagcaccggaagcagtgtgatgtcgggacagctcacaccgttttcccattttgataccgccgcaacggacacgcctaacgtctccgccatctgttcctgtgtgcagccctgcaccttgcgcatctgctgtattgtctttcctaactgctgcttcatcctaccgcctccactgctatgatctgttatccttattttacagcagaggcaggtaccggcacaatggacgtgtgttcaactgccggctgcatttttttaacttacgttcaacacggaccggtcatctcttctgaccgtactgtctcctaagctctgcctcaaattcctccgccggcatgggcctgtaataataatacccctgtatgaagtcgcagccgcattctttcagaaaggcgacctggctgtctgtttcgatcccttccgccacagccttgatattcagctggcagatcatatgcagtacctcttttacgatgatctgttctttttttaagtccttgctctctctgaagaacagcgcgtccagcttcaggatgtcaatatccagattcttcagcatcccaagagaagaatatcctgtcccgaaatcatccatggagcagagaaatccattttcgtgcagttcttttactatctgcgtcatatatttctcattctcacaggcaaccgtctcggtgaactctatctcaagcatatggtcgggaatcccgtaacgctcttttatccctcggtattccttaataaaatctgccgtataaaatgtcagcttcgatacattgaccgacaccgggacgaccgtctgccctttttcatgccactcctgcatcagacggcacacattctcgaacacatacgtatccagcttttttatactgtgattcttttcaaacagagggacaaactccccgggcgtgatgaattttccgtctgttgtgatccaccgtatgagcgcttccgccccttttatcataccgtcatagggagagactttcggctgcagatacacccggaactctctgttgtccagtccttcctgcatacggtccgtcaggtagacctcccggaacagcttctgtcttatgctgtcattgtaaaaggcataatgttcatccggcctgctctttatcgtcttctgcgcatagtttgcccggttgatgagtccatgtatatcgagctgctctatgacgtcctcccggcagcagaaaccgcatgcaaccgttatagaatgcttgtccggcagaacatccagattcacgaaccgccggtccagctcctgctgttcttccagcagccgctgtttatcctcataatagcggagcaggacgaaacggtccgccatcgtccgggacagaagttctcccttgcgtagagacgcttttaccacttccacatacttttggagaatggcatctccgacctcatagccgaacacatcgttcacatatttgaaattctcaaaatctatatataaaacggcgatccccgcatcaggctcccggtcgatggccttctgcgcctcctcataaaaccgttctgtcgtcaaagctcccgtaagcttgtcacgcccggccatatccgccagcttttccgtctttctgcgcagcttaaaatattctctcacataatagataatgacaaacagactgataagaaagcagaggacgcctgtaatgatcagctgtctggccagagccgccgaacgcgtccccgaatactcttcaatagtaaaaaccgtatcgttggcaatgtcaaacagttcttcacttgaattcagaagtttctctgtgccggctcctttcctcacatctgaaatttcctctttgatcagatcccaccggctgccaagcttctccagatcatcgttaaattctttgtatccggtccttttaagtccgtattccccctcgccgctcaaaagttcttccatgataccgcttacatagtcaatgagcgcatcgtccggcctattgttcgtctcaagcttgatcacccgctgcgaagctcccctcactatccccacatagttgataagcctgctgtaattttccatatctgacatcgatcttgcagaaacaaaactcatgaccagaatgataactacaacgagcggaagccccaatctcacaatctttttcatagctgtactccacatctgcacttatattttctttcgttttccgataaacattactcatactctaccacaaaatatgcagatgtgggcgctttttactgtctgttctgcttaaatttacgaaatatcttatatttcagacttttttcaccggatgccggatcacagtcctcagccgttccggtttcgtccgcctcggatcgccgagatagatctcatggtggcggcgttcctttcctatatcgcaccggtatccgttgtcctccacaaattgctccagcttccggaccgaagccggctcatcgtcgtacggccctatgtgcatcacctggcagcagagaccttctgtgtacgtcacaagctttgtccgggaaagatcaatgtccggtttctttttcttcagagtatccttggcccatgcaaatacgtccggtgtgacaaactccggctggcggatcatggatatccaccggaactggtccttaagccccgccagcttttccgttccgatataagctccgccttccatccaccacaatccttccagcggcggaacgacatactcaaaatatccgtcgggctggctgccgctcatcttgctcatcttgattccaaaagacagaccatataacacctccatcgcgtttttatacgcggccgctgtatttgggtctccttctccttccacttgtataaagaccatctccggaacatcaattatgacaggctttgtcccgggaagatataagtccttatactcctttttataatccagttttgccgtctttttcttttccattctttttcctttccgcccgtttcttcttcggcccgggcacaggcagctctctgcatgtctctttcactaatgtgcacagacgttccctctcgtcaatctcctctatgagaaaatatggttttgccccctcgtagggcggcgcctcctcaagaccgggccaggcgttacgcccggcttccgtgatctttatgaaaagctggtcctgacagatcagcgcgactatctttccgtcacagtacattccgtactctccgaacattttccggtaagtgatctctcctgctcccaagagctggtccgcgatatactctacaaattctctgcttgatgccatatgcatcctcctttcctctatgtgagaccagaataacacaggaatcacgacatctgtatgtcatgattatatcacaatgcagtctgatttgttctcacgtatcacaaaagggaacaccggggcgttatctgccccggtgcttttcctttttcttttgctgtttcagttcaaatttccgcagtttgtcagcttccttctgctcttttgtgagcactttccgctctgttttcatctgctcatgctgcagtttcagcgcctgctgggaccgcgttcccggccctttatcctccatctgctcatgcaccttgcgctgcatccgttttggatttacatgcgtttttcttacagcggcctccacagccggactgaatcgcagtctgtagtaattttcgagaaagaaagcatatacttcgtaagacctgggctctgctccgaatgtaaccttgcaggccgtcagcccttcttctgtcactctctccaccacccctacccagaatggttcctcaaaatatacactgaccgttaccgatactttgtccatgataatttcctccttaaaatgttttcaaagacaaagaacggacgacctaaggaggaaggttacttatatcctgacggatatgcctggactaccaaccagactgtgtttttatctttgctgttatcatgctaagccttttccggacttctgtcaagattgccgggcatattacctgaccgcttttgccagcctgtattcactgttgatctcaacggcgacagcctcctctgtaccggttccggacacagcgcagacatccccgaagaaccattccacacgcttctgccctgccgtttccttcccggtccagtcgatccgggacagttctgcccttgacagcggacgttttgtcgtctcatcaaacacgatattctttgccagcatcccaagatacgtacccactttttccccgggaaggacttcctctgtgatctggtaaacgactgtaccatatgttatctctgtacagttacccgcagcgatcgacacggtgtcttctgcagcattgtattcccggacctgaaataccatgtccttctcctgcagcagttcttttgctactgctttatgccatgtcccgtctatgccgacgatgagacggtccccaccgtcctgcttatccagatatacgtttccgtaggagagtgtatatgcggcctccgggttatcttctgaaacttttgccagatctttcaccggtgagttgaccgcatctacctctgcgataagattattttcacggtctaagacggccagcttccgtatgcagcctacccaggttcccagttccttttcagaaacggtatcctgcaaaattgtatagacctttcccttataagtaaattctgttacgtctttctcatggatcctgcattcttcctttgtccccgtaacttgatctatcatgccgcttatgccggaacatccggtcatgacgcaggcggctgatatactgcataaaacgatgacggcctttctgaaccttctccgcgctgactctatattcttcatgttctttatacctcctcatttcatacgttgtgccttatcggccccggccatgttacagtcacaggatagcgtacgactataaggattttataaggttttaaaaaaactttatgttcaggcagtaaaaaagacgtcctgcttcagaacgtctcacaccgggcagtatatatactgctatctgtcttttttcaggactgtatcgagcatgtcctgcagaaatcttataaagtccggtcccgcctgcgcaagcggcctgtcgttgtcataccggaaatcatacgcgtagcctgccacattatcatccgcctcattgccccagcttctgccctccagatgatctctccgtattaggagcgcagcgcacggcgtatttacccgtctcctgaacttgtctatctcccggccctctcttatgtgcacaaaaagaagttcggaatcactttccagaaacttcctgtactcctccacaagataattggtgggcagatcattgtactcggtaaataccttctttaagtccgcaaggaattttctggatctggcgtctttctctccattccagccgtatcttgccgctatgtctttgatgggggttatagatgatatatttgtgactttaaacgcctctgccgcaagctcgcacagtgtgtcctttcccaccccgccgtttccgttgattatgatgaccactttttccataatttccgctcccttatccgtctgcatattattataaggtttgaacataaaaaacacaactgtcaatatgccggaacaaacatcaagtatactttatattttccggaaatatattataaaaagtgtagtttgggaggtccccatgcagacgatctataacaagacgcttgaagacacactctattacaatgatatcgccgtattcacttacaaaatagactaccccttcttcctcactgcgtgcggcacatccgcagcacacggcatcaacaggcactatgaggcgaaggcggaaaaactggagcattactgcaggaccgccttgtatgaagaagccgttgaaagcgcacggtatatacagaagaatttccctccgtttcacagctatgaactcctggaagtgtatacggtcacttacaatgatagcggcatcaccagcctttttacagaccaatatacatatatgggcggagcccacggggcgactgtgcggactgcggatacgtggaatttctcttccggccggccgatggcgcttcgcgaattttacccggatacgcccaatttcccggaatctgtcataagctgtatcgaagaacagacgaagcggcggcttgaagacgccccttccacatattttgacaattatcctgaactgatccgcagtaattttcacccggaaaattattatatgaacgcagacggcatcgtcatattctttcagcagtatgatattgctccttattccagcgggatcccggaatttgaactgcattttcaggattcgtcagcctgttaaattatcgtatcggctgaaaacatgtgctcaatactcttatgtatcgcccctaaaacgccttctttattatccagttcagagaggagaatatccggcggaaacgggatgtgattaccgagcatggagcgccacgtatcgataaatatatttccaaacgctgttccaagaccgcctgaaatgataaccgcctcaaggtcaagcgccgcgcacaagtttatgagcgtcacgccgatgttgatcgatatctcgtctaaaaccgagcggacatacagatcatttgcccggtacttctccaccagcagctcaacctccttttgaaagttgtcgtgagagataaacttttcgatcttctcttttgatatgatactttccagcactcccacttcgtcaaatgaatccctgagcttcatgggttctgccaccatgtatccgatctctccggcggcgttatggctgccggaatatatctttctgtttagaacaagagccgagcctacaccgacgccatagttaatgacaatgaaattatcgtatccttttcccgctccttcggcctgttcgccgatcgcgcccatgtttacgctgttttcaagtatcagctctgtatcaaattcgtctttgatgcgctgtttaaactttttcagttctacacttggaaaatacggtgccagcagaatcgtatcatctctgatcacgccaggcattcctatgcctatacagagtatttctttctctgtctttccgctttttatcaaggcctgcctgatgacatcgactaccgcatcataaagctcctccgcttcgcctcctgagacggcgggggcttttacgtagccgagcacttttcccatcaagtcggcaaccataacacggatccagaatctgccgatgtcaacgccgatgacaaaccccatctcctcgttaaatgacagcagcatggactttcgtcccagtgagttgtcgccttctccggactctctgacatgaccttgctctattaatatcttcacatttgccgaaatagcgggaaagctcattccaagccgtctcgccagatctgcttttgacatgcatccatataaacgaaggcagttcagaatcaacattctattcgcctcgccaagatcttctggtttgcctccctttttcatctcgcaccctcctgtttaacgccaattataccatgccggggactgatttacaagaattcccagcccggcctcagtcgtatgtaaatttcactttgatcgtatgccggtacgtctcatttttcctgagcaccgccggcggaaactgtctgtaattcggggccgccgggtaatattgcggctccaggcacagaccgccgcggaaattgtaggcgcagccttcttttcctttctcactgccgtccagataattgccgctgtaaaactgaagccccggcagatctgaaaacatctccatgcgcacgtcgcctctgctgctctcaagctcagcgactttcttaagccgccccgccggtccggttatattccagttgtggtcgtatcccccgcttatgataagctgcgggtacggctgtccgatccgctccccgattcttgtcatgtcctgaaaatccatcggcgttcccgctgccgcgagaacattgccattagggcagcagtcaccggccagctcgagaaactggtcactgtaaattttcagtctgtggtcttcgatactcccgcccgtatgtccgtccagattataatagctgtgattcgtcatattcagcaccgtatccttatcggtacgtgcggtgtgtaccattatgatctcatcgtcatcggtcagctcataactggattccacttccagatttcccgggaacccttcctctccgtcttcgatgaaggcctgaaatgctacacggttgttctctacatcgggcacggcggtgaagcagtgcttgtcaaagccgcgtgcccctccgtgaagcgtattttcatggtcattcacaggcagatgatactgctcgccgcttagccaaaagcttccgccgcgtatctgcccggcgtaccggcctatcgtcgcgccaaggtaaagtcccgtgttctcatacccggcggcgttgtcaaaaccaagcagaacatctctgtgctttccggaccgctgcggcagtaagaccgcttccgcggcagcgccaaagtctgtgactttaattcgcataccatttttatttgtcattgtatatagaaaggcttcctgtccgcccgccagtttcccaaatgattcgacttttatatctttcatatctcactgccctcttctaaatattattttcttccctctaaccggcaaagcggacatccgccttccagcctctgttttggatcatttctctgatcgtttccggccctacatgaaacgcaatgctgtcctcacattctactgccatcccggcgcagatggtgccaagctccggggcgctcttaagctccgattccccgaagatccggtcctcgcagcccttctgcagcttcatgccgcgggcaagccctgccagcgtaccgcccagaaatgcgtccccggctccggtcgtatttaaggcgctgcaaagcagcggcggtactttttctgcagactgtccggcaaatgtataggctccatctttaccgcatgtcatcaggatgtccagatgaggatttaagctgcaaagcagcttcgacagctcaaggagcagctccctcccctctgaacggcttccggcagccgcctgcgcctcttccatattaacagccagaatatccacgtaccggtatatagagcgctgtgcaaattctccggcttcagacaccggcaccgacaacacggtaagggctccccgccgtttggcttccttcatcattgccgcgcgggagtcaaccgggatctcaggtaccgcgcagacaatagacttttcatccacccctatgtcttccatcgcgcgtaggatatactccggtgtgacgaggcctgacgcgctgttatccgctgtaaagttgcacgtctctctgtccggatactggagacagacactgatggtcgtcggaacgtccggactttgggatatgtaagtgacatccatcccctgccgccgcatttcctcaaggatcgaatcccccatgctgtcattgccgacgcagccgatgggatagaccgggatagtctctcttaagagagctgctgtataatacaggacgatctgctgtttgcaataatctttggccggactgagcgtcaccgaacgtgactcgctccggcccagtgtttcctgctgaccactcagaaacagcatgccggtgccgattcctccggtcgctataatcttgtcatatgtcataattttccgcctttatctttatttgctgtttaccctcctgaactcccactccggatgttcactgataggatgcgccgcggtttcttctgttgccgtaatgagcgcgtccggatgttcctgcagcagagtcatcgggtattccaccgtcggctctgaaaagagcgccaccctcagggccgtctgcttccacgctccggtcgccgaatagacccttacctttttcgccttcatgcattccttcacccccagtgtaatggacatggggggcataaactgccacgcgccgccaagcccccgctgggccagcgccagaatcgtatcgttgttattattctgtatcctcgcggtcgaaccgcgcaggtcgtccagtgacacttccacataaggattgcggttcgcctggttaaatgccacatgcccgtcctggccccagccgcccagcgtatagtctatctccgtgccggcgatcatatccgacatctcctgcatattgtacggggtcagaaaatgcctgttttccgtcagaacctgtagttcctctttgatccctccgtagaaataccgctccataaaggtacggaaattattcgggtcctccttcggcagtaatttcccttcccagtccaggttttcatccatatgatagcagaccatattccgaagtgatacgttcccggcattgaccatttccgtgaacggaccataccattccttcgggccgcacggcacgatcagccggaagctgcgctgttcttcattggctttcctgatctcttccacgaggtcacgggccatcacactgcccagttcatgagaatcctttacgatcctgaagggtacttttaagtcagttctccccggcagctcttccgccggaatactgcaccactcatataatttctttagatccattctttccctctcccttatctgctctttttctttgatatcacgtcaaaggcaaccgccgccagaagtacaagccccttgatcgcctgctgccagttagaatctacacccatgatcgacatcccgttgttcagcagtcccataaataccgcgccgatcacagctcccatgaccgtaccggtaccgccgtaggcagaagccccgccgatgtagcaggaagcgatcgcgtccatctcatagttctttcccgccgtcggcgccgccgagttaaacctggccacacagacaagcgcggccacggcgcttaaaaatgccatgttggtaaatgcaaagaacaagactcggttcgtattgaccccgctcatctttgccgccttttcattaccgccgactgcatacagataacggccgcccactgtttttgacgtataatatgtgtacacaccgacaacgacagccagaatgacaagtatcgtcggaagcccctggaactgcgccatacggtaagccgccaaaaggatcacgagacagataactgcggtttttccgaccgacggcgccagcttttctacggcgtagccttttctctgcctgtttcttctgctgttgacaactacaaagatataagcgagacaggcgagcaccgcggccagcatgcacatcagattgttgctgcccccgaaaggattggcgatataactgttgaagatcatcttaaagtcatcgggaaacggcgatatcgtcaggccgtctaaaatgatcagcgccacgcctctccaaaggagcattcccgcaagcgtcacgataaaggacgggatccgtatgtatgcgatccagaatccctgccacatgccgatcaaaatgccgagcacaaggcatatcacgataacgagtccaaagttcatcttgtacgtgaccataagcttccctgccaccgccccgataaacgccacgacggatccgactgagagatcgatgttaccgccggtcagaatacacaaaagcatgccgaccgccaatataactacatggccgttctgggcgatcaggtttgtcacattctgagggtcaaataacaccccgttcgtcttccatccgaaaaacaatgcgacgatcagcagtataaataacattgtatttttcttcagtacatcctttacactattcacttacttctctcctccttttactgctctcttccctgctttaatataagtgtcatgattttttcctgggtcgcctccgcccggtcaagttctcctacgaactttccctgattcatgatatagatccggtcgcacataccgagaatctccgggagttcggaagagatcatgataatggactttccttcttctgcaagcgaattgataatgctgtatatctcatatttggcccccacatcgatcccccttgtcggctcgtccaggatcataatgtccggctcggtaaacatccatttgccaagcaggactttctgctggttgcccccgcttaaattgcccacattctgctccacagtcggagtctttgtgcgcagcttttccctgtaatcttcagccacctcatactctttattcttatcaatgacaccgaaccggctcactttatccatcttcgcaagcgtcgtgtttacccggatcggattgcttaagataagcccgttccctttccggtcctcggtgatatacgcaagcttgctgtcaatggcctgctgaacggaattcagctttacctttttcccgccgagtgtcatctcaccgcttatattgacgccataactctttccgaatacactcatggcaaactcggtgcgcccggctcccatcaatccggagatgccgactacctctccccgtctgacatacatgctcacgttatcgacgaccttgcgttccggggcgagcgggtgatgtacggtccagtttcggatgtccaggctcacgtctccgaccgacgcatgttcccttggcgggaaacggttcgtcagttcgcgcccgaccatgcctctgatgatccggtcttcgtcaataatatgctccctgttctccagcgtctcgatcgtcattccgtcccgcagcacggtgatcttatccgcaacataggcgatctcatttaatttgtgggaaatgatgatcgatgtcatgccctgctttttcagtgtcagcagcaggttcagcagttttttggagtctgattcgttcagagatgccgtcggctcgtccaggatcagaagtctgacgtcttttgccagagccttggcgatctccacaagctgctgttttccgacgccaatatcctttaccaatgtctgaggcgcctcggacagcccgactgtctttaacagttcttccgactgactgaatgtgtcgttccagttcacgttataacggctgcctctttcattgcccaggaacatattttcgccaatggtcatgtacggaacgagcgccagctcctggtgtatgatgacgattccttttttctcactgtctttgatcttctgaaattcgcaccgctctccttcatagaagatatctccttcataactgccaaatggatagacgccgcttaatatattcatcaaggtagattttccggcgccgttttctccgacgagggcatgtatctctccttcttccacctgcagatttacattatcaagagctttcacaccgggaaaggttttggtgatccccttcatttccattaataacctgttcaaaaaatcccttcctttctaaagaagctgccgcagtctgcagcagctcttcatatcctttatgtaaatctgctattttaatctgtcttccgtgtaatatccggaatcaatgaggacttccttataattgtcgatgtccgcaacctgcggctcacaaaggtaagtcggtatgattcccgtgccgttgtcgtaatcttccgtattgttgatcttcggctcctcgcctttcatgatcgcttctaccatgtcggccgtcacattggcaagctctctcgtatccacgaagacagacatggcctgcagcccttttatcatgtttctaacagacgttatctcacagtcctgtccggtaatgatcgggaaatcttccgccgtatatcctgctgccacgagcgcattcgtgatcccatttgcgacagaatcatttgaagataacactgcgtctaatttttctccgcctgtgtagctcttggtgatgatattttccattctcttctgcgcctcttctgttgaccagttcggtgtggcacatgccgccagtgaaacttccgttcccgacttgatcaccagtttcccttcgtctatgtacttctgcaggacagacatagcgccgccgaaatagaaattgacattattgtcatctgtcgggccggtgaacagttcgatattaaacgggcctgcctgattttccaggtccagcttatcggcaatgtactgcccctgcatgatcccgatcttttcattgtcaaaggtggcataatatgtaacggcatcggtgttcatgatcagcctgtcatacgcgatcaccgcgatatcagcggcttttgccttctccagcacttccgagagggctccgccgtcaatggaggcaatgacgagtgtcccgcatcctccggtgatcatattttcgatctgtgatgcctgtacgccgatatcgttattggcatattgaatatctactgtgtagccggctttttccatcgcctctttcatgtaagcgccgtcttcgctccaccgctgcaagtccttagtcggcatggcgatccctacttttttgttatctttcttactgcctccggaggaactcccgccgctgcccgaatctccgctcgtgcaggcggcaagagaaaacatcatcgtcaatactattaaaaccgcggtcactttcttataaatcttcttcatacccttctcctttgaaattatttaatatcattcattaacatttgctcatatgcacgctgtaccgtcttttatccggtaaattattgaaaaatcctcctctctgtaatctaattcaggaaatttccgctatacttattaaagtttatttcataattaaggcaaaaaaatatcatgtttctgcaatttatagcatatttccctcctttataacgtttttatgtgcatatatttattaaacttaaattaattatattttataagtatccatttgtcaatctaatttgttattctgtcataattttcctacaaactctctgtctgcccgtaacgaagagccctgcctcttcttaaacagaaaaggcagggctcttttttatttaccctcactcatcaattcatttgccggcggaagacacgtatagtttttacacacataatacgtagttcttccatttaataatttatattcccgcgtctccccgctcaatatgtttatctccgcatacagaggaaggcggctcattatctcttctttattgtccccatctgccggaacaaccgtgatcttctgcggcggattctcatacagcagcagcgccgtcagaaacatgccgtatcccgccgggtattcctgagcctccccggacatataagcgagctggcgctcggccgcgtctttgtattcttcattgcccgtgatctgataaagcctcacgagatcgtaagccatcgtggaattcccgcttggcagcgcgccgtcgtacgtttcctttggccttgtgatcaagctgtcgttccggctcccgtacagaaagaaccctccgtcctcttcatctgcaaactgctgccgcgcttcctggcagatctgttccgcccgtgtcagatgatccacatcagagaccgcttcgtaaagactgagcagcgccgctgtataatatgcataatcatccagaaagcccttcaccgatccgctcccgccgcggcagctgactcggagcgtattcccgtccgcaagattatattcgataaaacggcgcgcccgctctgccgcttccagatatcgttcctttcccgtaacccggtacaataccgccatggcagaaatcatcagagaattccacgatgtgagcaccttgtcgtccaggtgcagcttggcccgacgcttccggtaatcgtataaaagctctctttctttgtgaaatctgtcagtaatctctttaccgtctaactcgttcggtatatttttcccctcgaagtttccttcttctgtgatcccgtaatatctgcagaactctgtccctctttctgcaccgagtagcccgcatatctcttcctcatcccagacgtaatacaggccttctcttccttcactgtccgcgtcctgggcggaataaaattcaccgtccggtccggtcatttcccgtaatatatactccgctgttttttccgccgtttcaaggaacatagttttccccgataccttatacgcggctgagtaagcgatcatcagcagcgcattgtcatacagcattttctcaaagtgagggacgagataaaaacggtcggtagaatacctggaaaacccatagccaatgtgatcgaagatcccaccccttcgcatttgctcgagtgtcttttctgcctcataggacatgaccccattttgaagactggaataaaacagtaaaaatataagattatgaggagtcggaaacttgggcgccgcgccaaatccgccgtacttctcatcaaaagcctgcgcaaacagttccgccgcccgcgcaggaagcgtggtatctgtccctgccccctcccgcttaagtgttttctttactgcccgctcctctttggtatcgatatgatctaaaatctgctccgccgaccccagaagctctgatttcttatacttccagtgatcactgatctccagcagcagctcccggaatcccttcattccataacggttatccgggggaatatacgtcgccgcgtaaaaaggcttctgctctgcggtcataaagatactcatgggccagcctccgctccctgtcagcgcctggcatacagacatgtacacgctgtcgatgtccggacgctcttccctgtctaccttgatagagataaatttttcattcaaaatatccgctgtctctttatcttcaaagctttcatgagccatcacatggcaccagtggcacgtactgtaaccaatgctcagaaaaatcggtttatcctcacgcccggctctctcgaacgcctcctcgcaccatgggtaccaatccacagggttttccgaatgctgcaaaagatacggactgctctcgtcttttaaatgattgcccataaccgttctcctctcctgtttaaagcctatgataaccatatggaacgcttaagatactaagcctgcgctggcaaatgcttacaatgccccaaaactccgttcgcaacgagaccctgcgccatcttgagaaattcatcttccgtcaggtcatttccgttttcataccatttggccattaatccgaacattgccgagtatgtatactctaacagataatcgagatgttccgtgtcgtctgaaaaattccaaaactttatcagcatcgactgaatgcttttgcggaactcacttgtgaatttgggatcaccgtttttgccgagcagtgtaaatattttctcttcatgctttttaaaaatcggtatgctcatcgtatagagcagattaatgtctcttaaattatcctcaaaaatatggctgcttaaaatattgtgcacttccctgcctacatctctcaaaagatctgcctcgatctgttccagcaccgcgtagacatctttaaaatagcggtaaaacgttcccctgttatttccggttatcgctgtgatctcagagaccgatattttatcgaccgctttttctttatagagcgtccagaacgcatccattattttttgtctcgtagccgcggtcacttccggctgctttttcatagcttttgcccctccttgttaaggattgacagagaatctctgtcatcatgtaacaatattgaatgtattgttgcttgataaaacgtataaattcatttacaatcgcatcatacaacacattgttgcataattcaagtaaaaggagagatacgaatgtcagttatagaagtcagtaagttgacaaaagactacggacatggcagaggtgtgttcgatgtatctgctcacgtggacgaaggggagtgcctggggtttctcgggccaaacggcgcaggcaagagtaccaccatcagacatttgatggggttttctaagccacagagcgggactacaagcattgaagggaaaaactgctgggagtgctcggcggagcttcagcgcgacgtcggatatctgcccggagagatcgcctttccttccgggatgaccggaacgcagtttttaaatatgcaaaagaagatgagaggtgtcacggacacttcctatttggaaatgctgctgaagaagtttgaactgaaccctgatatcggattaaagcagatgagcctcggaacaagacgtaagctggcggtcgtcaccgcatttatgcacgatccgaaaatattgatcctggatgaaccaacttccggtctcgaccctattatgcaggagatcttcattgaatatattctggaggaaaagaaaaggggcaagaccatattcctgtcctctcatatctttcatgaggtagacgcttcctgcgacaggatcgcgatcatccgagacggcaggatcgtatcggaatttgatccggaggtgttgaaaaaagaaagcgacaagatatacagagtgactttccacgataaaaaacaatggcaggagttcacctcccatacgtatcattttacttccataaacgaaagaaaactgcgtgccaggatccagctgaaaaacagtgagatcacatcattccttgcagatatctcccggtatcatatcattgatttcacagagttcccattttcactggaggactactttatgcagttttatcatgaagataaaatattcgagggggtgaagtgatgagcgatgtcattatcaaaacaaacgggctgacaaaagactacggcaaaggacgcggcatctttgatatagatctggaggtccgcagaggagaagtattcggcttcgtcggcacaaatggttccggcaagacgacaacgatccgcaatatgatgggctttatccggcctgacagtggaacttctgctgtaaacggcctggattcctggagcaggtcggcagacattatgaaaaacgtcagctatatccccggagagatcgcgtttcccgcgctgaaaacaggcactgaatttctgaaaacgcaggcaaaatatctcggcgttacggactttaaatatatgaatcatatcatcgaactgctccagctggaccctacggcaaacttaaaaagaatgagcaagggtatgaagcagaagaccgccatcgtcgcggccctgatgggagaaaaagaagttcttgtactcgacgaaccgacgactggactggatccgctcatgcgtgaagcatttctggaactcatccgtgaggaaaagcagaaaggccataccatctttatgtccagccatatatttgaggagatcgaagccgtatgcgacagggtgtccatgataaaaaacgggcatatcattgatacgacctcactttacgatctgcgccatccgacaacgaaaaacttcatcattgaattcgagcagccggcgcagcagcagaagtttgttgaagctgctccgttcccggctgctgccacagatgcaaatacatgtaccgttcaatgctctgtggaacagttggacttattatttaatacactaaaaaattaccaaatcgcatatttacgtgaaattcatctctcactgcagcagcagtttatgagagcatacaaggagggactgactcaaaatggaaacaaataaaaaaacagcgcggtatttctcaaagcctttgatggggcagacgatcaagtccaactggaccttatgcctcgcgatattgtttatcatgatactattaagcaatgttgtgaactatgccatgagcatgatggcaacagagaaatccgatgttgacgtcacagagtatcaggaaagcttctacacttatctcggagcgctcgcaacttataataccgctgcacagcagggcctgtcttacgatgatttttcgagcggcggcaatgaggccgcttatgagacggcttttcagatgctgaacgcacagtctgatatgaacctcagcacagaaggctttcaggaggcgatcgacggcctgtcacagtccgatatcagtctcgataaatatgtgaagcagtttgaatatgtatatgcactgaatcagtccaaaggcgtgttcgacaaagaagaactgacggtttcaggaatgcttacaatcacgctggatatgatgggcgtctcctcggagatggtggaaaaaatgagcgagatgaaccccgcgtcaatgatgaatcatatgtattataccgcaatgggcctgcttccaatctttatacttatcgtcattttgtcaaactctctgatcgcaaaccaggtggaccgcggctctatggcgtatgtcctgtctacaccgaccaggcgttccgccgttgccataacacagatggtgtttatgattgtcgttcctcttctgatgatcgccattgtgtgcgcaacccgtataggcaccacctttctgttctatgatgaggtgaacgtgcccgggatccttgccctgttcggcggaatgtatattctgatcgaagcggtctgcggtctgtgctacatgggaagctgcctgttctcacagagcaaaaaagcgatggcttttggcggcgggcttgcagtctggttcttcctagcttctatgatcgggatgttcgggtcggaaaatatggtcaacaccggtatgggtgtggaagagctcagcgtatttaataagcttacgctggtcggattgtatgatgttgattctctggcgaccgttgggaccggaagtgtggatactgcttttgtgtggaagctactggttttggctgcagttgctgctgtgtgttatgcggttggggcggttcggtttgctaagaaggatctgccgttgtaggttttgggtagtgttgttgtgtgggaatagaaaatcccgggagctgggtggatgggcggctcccgggatggtttttattgcttgacgttattcgattaaaccaagttttacaatcatataaagagttttccaatttcctgaatccttccccaccgactgtggattatttcccagacttctacttctctctatcgtcgtttccactaattctggtcctaaatcatcaattacaatgaatggattttttctccattcatacacaccatcttcttcctttatcaatgctctgaacgctcccagtattggatataaaaaacccgtcggagtagagtaatccatatccttatgataaaattttgaacgaaatggacagccattctttgccagcgtaacaccttttactgatccatattttcctgtcggattcttttctttatagtatttcgccatatttatttcaatatggtcatataatttgaatatatccttcatcaacggcgccatttttatatatggattaggaaaatcctctccatattctttgtgcgcttttatatacaaatcaatgcattttttcttagaactatatgaagaagttggatatttatccatatctgaatatatatcaatattaaacatattcagaattgctaaaatatctgcgacatctatatttccttcttcattctccttgaagaaaatatctgtagagtaggtttcccttgaaatggctttctttataatatcaaatctgttttctaattcagcaatagacttatcctgcacttgcgtagatgtatttctcgctgcggcaaggcgctgaaatattccctctacccccgttaaaatctctaattttacaaattgttttcccgcatcaagtttatcctgattttccagtattattttatatgtatgcccaccatcaatatccccgtgacactcaaaatcctcaaaagatacagtcatttcattattgtaattattatatgacacctttgatgctgaaatacataatccacgatttaacaaataaaaatccagataatcttctcccaataaagatgctttgattttttttggtatcccagttgttaatttttgttctcttggattagtttccataggtatgtctttaggaatttcctttacgtcacaaattgctatatacatcattgcatccttaaccccttcatcctttgttgcataaggatttggtatctttctgaatgactccaccttaattctcagttctttgcccataattaaattctccttcaattttataattgtattttgatacgtggtacaaccaccatctatatacaattatagtataatttttcaatatgtcgacgctatatatgacgttatgtgttatactggttaaataggagaaatactatgaaaatacgttcaactgacaatataaatttctattttggcaataatctacgtttatatcgagaagctaaaggcttatcacaatccaattttgcagaattatgtaacataagcagagcatattatggccggatcgaacgtggcgagcatagtattactttagatttatgttataaaatatctaataacttaggaattcatatttcagatctgtttaaagacttaccggattaaaaccttcagcttttcagtccttatagcaatctattctctttcgagacttacgacacaaaaactatctctgttgtcagcacttcactgtttaaaaataaaaaaatctttattgcacataagtttacaaagttggacttgtcaaggttttgtagacacaaagttacgtggattttatgaattttcggcttcaaattgcgcaggagaaatatattcaagtgctgaatgtatccgcttagtattgtagtataattcaatatatttaaatatttctttttgagcttgttcaggagtttcgtagtaagaattttgaataagctctctttttattgttcgataaaaagattccattaaagcattatcatatggattcccttttctactttcactatgaatcgctttgcgtgctttaagcagcatctggaagttagaacttgtaaattgtgctccttgatcagtatgtataattagccctggttctggatgttcttttccataggcttgtttaaatgcggcaatagctaattgatctttcatttttgtatccattgcccatccaaccacttttcttgagtatatatcaataaatacagctaaatataaggttctttttttagtcggaatataagtaatatcaccaacccagattttatttttacattctgctttaaatatctgattcaataaattaggatgttcttccatagaatttttttgattatatttcttatatttataattagtaccacgaggatacaatcccattagccgcattaaacgtgcaactcgtttacgattgacttttactccttttaactctaattcttttgtaatacgaacagagccatatcgacctttatgttcctcgaaaatctgttttattttttcacttaatatttcattttcaatatctcgattagaaggttttctttgtaagtatttataatatccagatctggaaacattgagaattttacaagccttcttgatatttaaagagttttgattttcttttatataacgaaatcttatgtattctttacgaagctctaagttttcattttttaattttctgatttcatactgatatgaataaagtgcggttccatgacctggaaacgcactttctccgtattcttcatattcatttatccagcgatataatgtgttgtaatgaatagacaattcttttgcaacttcggatactgacatatcatcttctaaaaccagctttacagctgcgagtttgaattgtttatcataacttcttcttgccataaagtagaccacctttcattattttctcttgtttttgtgtctactttattataccatgcccacctagttgatagagtaatgtgtccagatttctgggtacatatcaaaaaagtatccttttggggtcttaattatggactatgcttaaagagaggaattaattatggaaatctgagctttgtcgatcatacaagtattggaggcaaaaagataatttttatatttggaaaagtgaacacttatctgatttacacatatattcttcgagttttatataataatatgcccaggaaattaattgttcatgaactcgggcttcaaattgataagcaccacttgtcagttacaaaagccatggatggtctataaccgctgaaatatacttctttttaaaaaaagagatacgttattatatgattgaaaagtcggctattaatgtttctttacaaagttactgatctgcttgcataacaggtataaaaaaggcatcacgcttacaacaaaagccccctaagtagcgcaaacacgccatttatgaagcttatcttattattcataacttgtaaacttaaagtcgattctatacaattttgtttggatattttggctcaatttgactttatttttcttcaactgtcttgttcctatggtctatataaactggtacaatcatattgttatcagggaattgttgtccctcttcacattttaatatattaatttattctacgctacaaattaaataaatcatattttattcttcctgttgtcaaaagagcgttacttttcaatataaatctacacaatcaattccacttctataaaatgcctattatattaagcaatatcctcattagattttttacattgaacacctccaattaaacaacttaaaaaactataacaatcgcaattattgctataataagtcctaatatacttagatacatattttgcatatttttactctcactttttagttgttctatttctttttttaattcattaattgcaccttgcatcacgttattaggcaaataataaacaatttcttctttttctgagtatctcccattatacggcgttgtaggctccaaaagtttttgaaattctatagtcacaaaatgttgccctctttttaaacatacacttttattagacgtattaaataacaaacaaaaaagttttcctctgaagccaggatcaacttgtgtactatttgataaaattattccttggcaaaataaattaaccgccacatcaaaacgagcagtaatatcacgaggaaaattagcggcttcatagcatgatgctatcacataatcatatggttctataataataaatggattttttttagacagttctttaatctctcctgaataaaaatattcatcagctaatctaagatcgtatgaagcattactagtaaaaacattgtccgcatttttcaaaagcatatcattttcgattaataattctattaactctctatgcactccccctcctacatttttaaattcccacaatttatcgatcaatttgctatttaattcaacgtcacttctattaacaacgtaacttattttatcaaagcattttttttcaataactttttcctcattgctagtttgatctgatcgaatcaaaaaactcattgggcgcaattttttttcattcagcaaaccatctatttcttttatgtagtttggcgaaataactataataggcaacttttttttagctattatgtttcttatttcaatttcactaaaccccactgaataatcttcttggctcactttgcaatcaccaattttatcgtcaagcttaactttttcataacaattacaattacgatttaagcaaaatgtttttttagtctcataaagaggatagaacgaagcttcagataactccactagtttataaactattttttctaaggtctcttcgttaaacccgctcaataggatacactgatatttcattctggcaccttcttccaaacaataatctcttcacttccgagactagcccatttttgattgtttgctctatgtaatgttggtatattcctctctaatgagacaatttttaatccacattttgcttccatatcagacttgattttctccataacctctttccttacagaacctttttcataacaaggtaaaacgtaacacaaatatccataatttttaagcttgccgaataatatttcattgattttcaacatagattccatataattctctaacgcatctggtcgatttctatttcttctacttccaatttcgtttgaaatatcagtctctatcggtaaatcccaaaaataataagataatttttgactttgtgaatagtcaatcatattaggatatggtggagatgtaataattgtattaacgctttcatctaatatattatccaaatttaaagaatcttttttgagcaaagaactttttattgagagattttttaaataatcactatccataaaacctacaatcttttgaatatctttaatcaaaaagtttacattcgaattaaagtaagataacaccttcttttccttaaggtctttgggtttaacaccgtcagcaataaacccccatcccttgttttggctgctacacttcattaacatattcgagatagcaatccaaaaagcggctttacatatattggaactacttgttaataccttatattttaaataacataattgattaaacgttttcggcgcaaaccaaaatggtaatatagattttaatttttcaccttctaccattattgtatagtcagtttcatctttatacccccaattaatatccactagttcttcaacaactttaattaactcttgattatttttaatcaaatatagtagacttcgtgtaaaacggtttgctatttcacaactttcaacccctattggtttcctttttaatataagtgcttgaaaaaaagtagttcctattccgacaaaaggatccaaaataatttcattttcttttgataatatttctattaaagaaaatggtatttcaggtacgtatgttcccggataccaatgatgcttcctaacattaaacggactcgtctctgtaggagataaataccctttatttgtaaaatcccaatcaatagaattcattttgagaattatattattatcttgttcatcaaatatcatctgattcttcatataattcaatcctcttaagcagactatcttccgttactacctttagataatcataaatcaattcgtctacttttttcatatttgtatactcttttttagattcaactttaaatgtagaataagccttgttttttatgaatgccccaatcaatagatgattggatgattccccaatccatttttcatttccctctaaagtctttactttaaaccgtctattggtcttgtttttatctagtattggatgaaatgctatgtttagtctaaccttactctgcagacttctatttacactttcttccgcatcaagttccaatgaaaatctgctttccgcatcaagaaatttattatatatttgtacatttgtagtcttataaataccaatgcaaccatataactccccgcacatcaaccgtttaataatagctgatacatccaccttctttattatatacttatataattttatactattttccaaacattccatactatatatattgttcttatatctaatttcatatccaataggaagatgctttattacttttccatttaaaaactcctcatcataatgaagagctaaatagttttttaattcgctttcattttttatatgaatatctaaaaattcttttataaatttcttgattttgaacgtactagattccttatcagctattttttgtagcatctcataatcagtattacaccatgttagtaatctattatcttcaagattaatactatcaatacattctgatagcatgcactttcctgaaaactcatcaggattaagcaataataatttatacattttttctcttgtataataccaatctatgaataaaggtaatgtacattcatctaccaatatctcatcccctataagtttaaaagatctagccaactttagcggaatagacttgtcgatatctattcccatatgaaatgccatcctgtatacattatctatattatcaagatctattgtaccacaaagaagttttcctaatacaccatctcctctaataaattgtcctatattttcaatctcgttttcatttatatacttagccaactcccttggcatatcaaaaaaaacattttcatgggttacatttttatacgaaaatccatcttttgaatttataccctgaatagcagatctaaaaccttcttctggattaaatccttccttttcaataatatattctaatgaatgaccaaaaggtgcatttgcaatatcatgtagcaacgccgcccgaataaagtttgttttagtttcatgatcaataaatggattctctttctccatttcttctatacaaattttagccaagtaacatgttccaattgaatgctcatatctattaatattagccgaccccgttattgacaaagaatttatattgcacaacctgacttcccgcaatctctgaagttctgggacatttattatatcatatatttcaggcataaaagtaattgctccatataagcaatcataaatatattttgattttcccatttatccctccattattttttttacacattttacccccgacgaatacgattgtaaaatacccctaaaatgtccacatcccgctcctataacatataaatcttttccaaccataaaattcttgtcacacttcaccttacatggtacaatatccatctctggaccatatacaaatatattggaataatcattttctttcaataacacattcaaaaactttccgcttgcattccgtaagtcatttagtatactattagtataaattagagaaaaaacatttcctttcttgttcataaaatctagtattggaatttttataattgtagaactatcattattataataccattttaacatttcataatattctttacagtaactattaatgcgtgttaatactgcaaaatttgttgagccagaatctaaaaccaaatctgaatatccttctgtaaatagatggttatttaatctataacctaccactttccctttagcagaataacaatatgtcctggtatccttatatttcaatttaatgtccccgtgtaactctgatatatcattcaaaagttcatttggacattcaattctaattcctgcatcaataaaattatcctctacgtctatatattttttttctataacttttcgtattagatgttctcctgattttcctaacgctagaactacctttttggctataatgtttctcttagtagttactactttataaaaatgattttctctactaatatcaactacttcttcattcgtgtatatttttgctcctaaattttccaatctacttttttctttaaaaaacaactttttcagctcatgatgactaaacttataaacgtcgtagtatttatattcaatatcttcggattcaaaaactggaatcatttgttcatatactttttgacttacctctactctctgtaaatctattttttctttaagtacatctaaggattcatttattagccttttcgtctcctcttctccgcctattatttttttcatcttagaaccagctggataaccacttatttttccactacttaaaatcgaacatccacccacaccagcaatcatgtgacaagtagaacattctttgcactcctttgactccaagtactgacatgatctattttcaacttcatctcctgcttcaaaacatattagtctcttttccatttttccacttatttgactagccattcccaaccatgctggtcccatgccaactatacacacctcaaacttattcaacatgtattataaattcctccaccctttttctgttatcaaaatttctgtgaaatatataattttgatcattatatagaaatacaatagggatattttggtaatcctctgcaataaactctaattcaaaatctccttcttttgatgttgttgtggaaaacccccctacacatacctctatatatttaccatccaattcagcactctcatctttcacaattatatgtccctctaaatttaaccgatatggaaatacactattctttattaggaagtcataaaaaggcattctattaaaaagtgtggggcataaaacaagtaaaaacaaaaaaagtgaaaaacataaaataagtatgttagtaaatctcgtaacatttcctgttcgtcctctcaattttattaagcactttttcctccaaacataaaaagactctttcaacgacatagcccgtcccccaactgttttctatattctcatataaataatcacatattctttactgattgacttcacgggtaagtcattcactctagaagttctattgggagttcttttgtgtaaaatttctcgttgagccacctcaacttttcgatatcccttttcttccagatatttcattgtaatttctgttaaattgatattaacattgtttacggtcctattgcccaacgtcataacaatacatcgtcgagtaaccctacataactcctttaaaaaaataaagtaatcttcaaaaaatgcatttactttattccgcttttgttcacatattaattccatatatggagcaataaggcgctgccccaaaacatctgaaactgttttcttccaatcacctcctaaacttctattgtcaattatcgaataattattcatttcccaaccttctaattctaaatctaagtcatcaatccaaaataaacttaacatagaaaattgtccatacgtaacagtagtggcattatctccatatggcggtgatgtaattgaaacatcaaatttatcatcttcaaattctgtaattttttttaatgtatcttgcttatatagttcaaaattatccgagtgtttttgaaatctgcaataatttttttcaactcgtctacagtactctttaattaagacattttctattccaattattttttcttttggctttataaacaatttgtatgtagaactttgggtattactatatcgtcgaattgaattacacaaaatataccaaaaataatctctatttttcttatcctcaattctcataatagcgttccgtatttttgtcaaatcttctgctatatcatctctaaaccatttatctcttttaggaaattcatatatattaccacctttctcattactaataaaactcttgagtttatatatatcactttctatattatcattaacaccctcaagttttacctttgtaatcaaattggctaatggatttatatcacatccaaataattgtattttattagaaacttcaaacgcctcatataacgctgtacccgttccatgaaatggatcaaatacacttctaatctcaaatttctttgttaatctctgtaatatatctttttggattggggcaaccatagttgctggatatagcacggttccatgtatatcatctttttttctatagtttttatatgtaatttcatctagcattttcatactccattttaatcatcaacatattaattttatgaataataaaatcgctatttactcaaaaaagtatatctttgacatatctctattatatacatctgtaaaaaataaagcaatttttttctccatactgtcgcgtattcccctaataaattcagtcatagcatccacacttgaatgtagcacattcaacatactacaaataaacgtatatgattctctatccaccataacctcaattgtcattttatcatcttccatcatacagaaaacatcaacccccaattcctccctgtctcgattcaggaaccaactaatctcctcttccgtttgttcctccagcgcatttgccctacatcatggtgcgcagaaaaacctcaccctttacattcactgccatggaagaatgtccttctcttttttcttctgctgttgcacatcctgccaataataccagcctaatataataaccttcttcattatttgcacttccaacaaatatgcagaaatcaatcctaatcagactgcccttaatccaatttcaacctctcacttaaatctcaactgcttcttgtcacatagattctttatacggtttgtaatatacttcttatttagaaagcaacctacatctcactttcgatatatgttactttctaccctctatcataggatattattagattttacctcaaaaatacaatttccttggagaagcaatatactatttatctcctttttatactcctcaagaaaccctaagtgcaacatagattttccgtaagtagctgtctccgctggcaataccaaatccggcaaatagttaccctccttgcagcatataactcaatccggcgttttccttaaacaaatcattacaatcagataatatcagattttttcctctttcaaccttttatttcccgccttgtttttccgataactgggggccctctctagtgtcccagatggtggcagcaaatcctcagttttatctttaaactctttaattcccgatcaagtctgttcataaccgacttgataacaaccctttttgaataccagtacctactattctaccttctcggagcgttttacatcgtcctctacaacctattctgacttctttttggtttcctccaacatctatatattagctctaattctgggagattttttctcccaacgcttcactctcagcctacaaattccctactatctgctccaaatgactaatttcttttcccgctcttttttctcaaatccaatatggaaaatgtttttgatgattacctttctcttcccattcaatatcatacctttgcatgtcagcatcaagctgtttcttttaagatgccactctttgattccactccatattgttccttgtgccaatttttaaaacctaacaccgccaatgcctattttaagagtacacttgtatctctcccgtttgcttccattggtaaacggtacaaaatcgatgtacaaatgaggggttgcttcatctatatgataatgtaatataattattaatagggaattctgcccctaaaatcttttcatatactcgtccagtactttgggtccatctatagtaacacagcttgttttggcagattctttatttaatttgcgtatcagtttatattagaagatatctatagtctgcacatcgataaaatcgttggcgaaccttgtctccggctggataaaagcaggaaaaccacctatcttaccatgcttaatatgtttcagacatagcaagaacagtccgctgaactgaatgccggggagattaccaaagaggaatatgagcaatggatttatacttaccctcagatggacactgcaaaatctaaggaaaatatcaatgccttacacgctgaacgaaaagcaaagacacaactgacagtgaatgaacctaccaacaaaaaaagggcttaccaaattgattttacctaattcagtaagaccttttttagttggattaatataccttcacttgcaaaccactaatgcattttttgtgtaaagacatttttttattattatcaatttgttatcaaataaagccacgaaacaacctcaagcgccctgtttacgcgtgttctacgaacacttttcttattcaaactcggcctgtccattggtgttattaaacgaatttgtttagttttgttacatttcaaggccgtttcttacttgtattgcatgtattattttgacttactgattttttgttgccaaaatgttgccacacaatatacgaaacaatactatccccatcataatatgtcgtctgccaactaaataaacgcttcgctaatcttctcttattaactacaaatcaaattcaattctaaaccatatgtttccaataggaaactctcacttgcggaaagtaattgatgcataccttctgttataatgtccgcatctattcccggttgtacaataaaaattttaagctttgctggataaagcttaagcctgttgcgcacttcttgcaaagtcgttaaatcacctaattcaaatctggaatttttacctttcttctccctgtctccttcccgctttttcattctatcaatcatctttatcatatcctgtttccagtttattgacttttctgcttgtccacatacttcatataggtctgataatctggctcccggtttatccccatgagcaaatttacaatgataaaattcaaaatcaatctcttcatcttttattctaattgttattatatctgcaatttcaccagaattatcatcatcaaatattatattgtataaacctgttttctctaattctctcaacactgaatactggattgtatttctctccttctgtgccccttgagattctttttttatatcaacacctttcttattccaatcccaccttattattttttctttaggaaactccatagggggcttttctttcatagtaatataatagttgccctctaatattgattggtcaacaaatttaatagttgggggatattctttaaagaaatctactaaccccatattctttttgcctattttaatttgcaatacacttcctttgatatgagcaacactaaaattattctcattaatgctcagttcaaactcttcagatagttcatcgcctttaacataaaaatctatattccccgtatcactattattacataatccaatttcaacattatacaattcttcctgataataggagttttctatatatgttgacttatcattacacaattctaaatcaattggccattcaatgcgataaggtatgatattaggacgctctttaataacttctggcataagaacaccacttaaaacttcccttacatcaattgaattatctagtactttatcaatagtcctatcacaccactccatccaaaaatctatactctcaacccaacgtgcccaaatagtacctttatacgaacaccctatacttgtttttcctgttccatcataaccaacaccaaatatattagatttagtgctattactcttttgcgcttcccccaacccttgtacaatatctactcctgcaaacattttatatctaactggtccattcactgccgaatttaatccaacggttgataacattagacgattaattccggataaacatctaaaaacctgatccccatttattctttcacattctcccatgatcgcttcagcatatttaagcgcactcgtttttacagaagtattaacaaaagcaattcgttttgattcattatagtatataatgtgaatttcccactttaaattattaatttccctgtaattcgaccactcaaggcgagattcagatggttcaataacaatcaaaacattcttctcttcatttagataatatttacaaacctcttcattaaaaacctctttccattttccccaatttgtcgtcccctttcctaataccttaaatgctcgcatacttactttaggaataatctgcttaatgctgatgccatttattccatttcctttaaaaccttgttctaactcttgtagtgataattctttgccaaccgctttagaagacatatcggctaataaatgattccagtctgaatcttgtgagtacaagtccttgagactttccttaatatcttcattaataatatttgtgataacagaagcatttcccaatccttcttttgcacgagcaaatcgcccaacaaactgcaacgtaataggaagtgatttgtatttatcatggatagccgcaatttttaaattaggtaaatctataccttctccaaacatatccacgcatacaacaattcttgaatccaaattttccaatgcactcatacgctttttcttttccgctgctcctataccactcacaatcaatactggattatatcttcgatacaatttattgtatatattgttatacaattcttccgcccttgcaattttcgttgtcctgacaagaagaatatgtgaaaatccattttcaatatcagattctaattgctttatagctatggctgcaatagatatatcccctttatcttcgttaaactcttgtatcggataaaaatctattttttgaaaataaccttgttcttgtgcttttattagaggaaagttatatattatttttccatcaattttttttccatcatttctgaaaggcgttgctgtaaattgaagtatctttttgccagtaaagtatgtacggaaatcagtccatgtagacgctgcaatatgatgggcttcatccacaattagcaggtctggaaaacaagcgattatttcaataagttctttggacatccttgcaactaaaggcattgttgtaaccaggatattagcattcgataacaattcttccatttcctcaatatcttttggacttgatttaagcaaaacagtagttggaataattgctttatctgaaatcacacctatttgcttaagtacaccaaaagacactattttctcaacagtttgtgctctcaatagatttgatggtacgataattaacgtcttctttattttttcagatataatagtcgatatcattgtttcagtttttccagtaccggtaggcataacaatagtagcaggggattcttcaaccgtccaaaaagctttaatagcagataatgcaccatactgtggtactcgaagaccttttatagacttttcaatatcttcttttataaaataaaaagctttttcccatgatgataatatattcttttttgtgtcatcatagaatttatagttatttcctatttttatcttttgaatgcccataaaatctccttttctcttccagtattaatatattgttttctcagacttaaataatataatcatattaccattttattccttctaaaacaatcgttatacaattcatcttacgtaattcattcataatataactaattatctgatttcaacatattccactaatataagagcggagaatagaattcactccgctcttcctaaagaacaaatatcattttatcttgttgttactcaaaaactaaaaagggtgattggcaataatggcatcattccatggaaaatcaaaagtgaacaaagtcgctttaaggaattgaccacaggcaatgtcgttatcatgggacgccgctcttacgaagaaatcgggaaaccattacctaaccgaaccaccattgtcatctctactactaaaaattttgataccgaaaactgcttgactgcatcatcgctatcagaagcgctacagttggcgagagatacggatatctatatatccggcggcaatcgagtttatgaagaggccttgcctttagtcgagaaaatgtatattacagaaatagatgcagagattgagggcgataccttcttccccgcattctctgaacatgattttacaaaaacaaccgaaaaagaagtagcaggcgaacttccctattcgtatataacctatacaagaaaataaatttgtcagcccgtcatttgaacacgacaaaaaaccttaccgaattttcatcttctgaaaatcagtaaggtttttatatgctataaaagtaaaaaactcactccgtgatacctatatgatacccggaaatgttgccaaaacgttgccaaaacttaaacaaatttgcttgaaacccgcataaacactagcttcccgaatccttgtacatcactcgaactctatcgtccccggcggcttcgaggtaatatcatacataacccgattcacatgatccacctcatttattatcctgctcgtcaccttctgcagcacgctccacgggatctccgccgcctccgcagtcataaaatctatcgtattcacggcccgcagtgccaccgcatagtcatacgtcctctcatcgcccataaccccgacgcttctcatattcgtcagcgccgcaaagtattggccgatgcctttgtccagtccggcactggctatctcttcccggtaaatggcgtcggcgtcctgcaccatttttaccttctcggccgtaacttcgccgacgatacggatgccaagccctggtcccgggaacggctggcggaatacgaggtattccggaatgcccatctccaggcctgctttgcggacttcatccttgaacaagtcacgcagcggctcaatgatctctttgaaatcaacatagtccggcagtcctcctacattgtgatgggatttgatgaccgcagactcaccgccgagcccgctctccaccacatccgggtagatggttccctgcacgaggaaatcaacggcccctattttccgggcctcttcttcaaacacacggatgaactcctccccgatgatctttcttttgtcttccggctctgacaccccggcaagtctttcgtaaaatctctcctgcgcgtttacacggatgaagttcaagtcgtagtggccttccggtccgaagactgcctccacctcgtcgccctcattcttgcgcagcaggccgtggtcgacgaacacacacgtaagctggctgccgatcgccttggagagcatgactgccgccacagaggaatccacgccgccggacagggcgcagagcaccttgccgcttccgaccttttcccggatcgaacggatggattcttccacaaaggaatccattctccagtcgccggcacagccgcatacattgtgcacaaagttggagagcatctttgtgccttccaccgtatgaagcacttccgggtggtactggatggcatataatttcttcgcctcatcttctgccgccgccacaggacagtcggccgtgtgggctgttatttcaaatccgggagctgtcgtggatatatagtcaaaatgactcatccagcatatggtcggagatgcgacctggtcaaatattctggacgttttcttgtcgatcagcacttctgtcttgccgtactctcggacatccgcgttttccaccttgccgccaagcacgtgcatcataagctgcgcgccgtagcagaggccaagcaccgggatgccaagctcaaacagctctctgctgtaagtcggtgagtccggcatatagcagctgttcgggccgcccgtcaggatgatccccatgggattcagctctttgatcttctcaatatctgttttataagaatagatctcacaatatacattgcattctctgacacggcgcgccaccaactggttatactggccgccgaaatctatcacaattactaattctctcttcacaagaagttcctcctatgtctaaactatttttcaattatatacgagcccctctgcatttacaagggtaacgtaaaactttaggcacattatacgattgcttttttcttccagcttccgcggaaataccggatagcaaagcagattacacggaagatccagtcgatgaccatggcgacccatatgccgaatacgcccagtcccatatatttgccgagaatgtagctgaatatgatgcggaagatccacatggacaaaatggagatgtacatgcacgcctttgcatcccccgacgcccggaacgtggccgggaggataaaggataccggccatatgagtattgcgctgatcccgtggaaatacaggatctgctttgtgacgccagccgtcagatccgacagatgatatgcccttaaaataaacggcagtatgaggaaaatagccccaaccgtcacaaccatgcagatgtgggtgatcatgatcagcttcttattataatagcggacctgttcatagtctcccgcacccacacagcgggcaatgacggtcgtggccgccagtgtcatcgccatgccgggaagtatctggaacagcgccacggcattggataccgcattggctgctatggcataggtgccgaacgtagacacaaggctcagcacgagaatctttccgagctggaacatactgttttccagaccgttcgggatcccgatgctcaggatctttttcacaagcctccagtccggccggtagcgcagtgtcttttctatatgcagcgtcctcgtctgatttacaagaagagcaatgatgagcaccgcggccaccatacgggagacgagcgtcgggatggcgacaccttccgttcctctgtggaacccgtagatcagcagagcatttcccgctacgtttatgatgttcattacgatcgatacctgcatggatactttagagtttcccatggcgcggaagatggcggctccgccgttatacagcgccatgaaagggatcgacgcggtcactatcatcagatatgtattggcatggcccatgacgtcctgctctatcctgccgaagacaccgtgaaggataaaaaacttgcatgcgtacacgatcaccgttatgacgaccgcgctgacagtgataaaccacacgagctgtgtggccgccctgcatgcctgcttctgatttttctgtccgaggtactgtcccgccacgaccgcgccgcctgtggcgagcgctccgaagagattgatgagcagcaccatgatctggtctacgagggaaacgccggatacggccgcttctccgacacttgcaatcataatagaatccgccataccgacgagcaccgccagaagctgctcgatgataagcggaatgatcaatgccagaagcgctttgttgtcaaaaagataaccgcttctgtctgtctttacttcatttttcataataaaaaaactcctcactgcataccctggcggacataaacggtccgccagatatatacttaccggtcattgatgacccgataactatatattatacgccgaggagtttcctcattcaagagcaaccttacgctgcaatgtatttttcgatatcctgccaaagttcatcacagctgtcatgataaacctggagctcgatcttattcttcagtccgagattcataaggcctaatatagacttcgcgtccacaatgaatctgccgcgtttcatatccatatcgaaaggatacttgcccaccttattgacaaagtccaggacatcgtcaggtctttgaaataccactgtctttctgctcataataatctctccttaccattttaatctatgctcatcaaacgtctgacgttcaataagccattcaatatctagtccatatgttcattataattattgccatgttaccatatattgtttcattaaaaagggggaaatttttcaaaaaggtggaaatttttagcagtatttgtccaatttccgacaaacttctgccttaattattcagtttccgatactcggcaggtgtcactccgacttcatctttaaataccttactcatatatttcggatccgtatatccggccagatctgcgatctggttcagcttcagcgttgtctgcagcagcagctcttttactttctctatccggtatccacgtatcgtctcagtaaatgtcttacccgtctcttttttaaactgtgcgcttaaatactcctctgacacacagagcttccgggcgatctcttccagtgttatcccctgattgtaatattcctgcatcagctgtcccgcgcgctgcaccataagacttgtggcctcttcctccctctggaacctgaggcttttatagaacaggccgtatgctttccctatctgttcccacgtgtatgcctgagtgatcagattcatgatatcctgggcagatgtatcctctgacactttgccggcctccttggccgtatgatatatggccatacaatagcggatgcacgcctcctttatttcttttggaaaatggacatctgccagaaagtattccctcagccgcttcgtacacgcgtcaaattcctccctatgatttgacacgatggcctgtctggcctgcgtctctatctccacaggatatttcaccggcacagcctcggcctgcccgatccgttctctgctgatgagcacttcccggccgaggacaagattccattccagatcttccctcattttctccagcgccgggttcactcccgccagtcccatacacgctctccagaccgctgcgatactgccttttacctgtccgcagagcatcggcatcactgctttttgaaaatactgccgcagctcatcctgatcgtccatcttatagagaagcatgatgataccttccttatcctcaaactccagcagacacgaggagaacgtaccgttatggatccccgtctcttccagaagcgatctgactgtgtcgtgatagaccgggtagcagccgctaagctttacgagaaagacaacgatctcctcgtccggcacaatgcggaaatgcttttccagcgtgatatctgtctgcctgtcagatataaactgcccggtcacactgcggtaaaatatattttcaagggtaaaaaactcttccttgctctgctcctctatgatcgttttctccacctgctccagcgcccgtttcagttccggtatcttgatcggtttcagcagataattctcaatgccgagctcgatggcgatcttggcataggaaaagtccgaatatgccgacaggacaatcgccttgcagctgatccctttttcccgtactttggcaagcatcgttagcccgtccatgtccggcatatgaatatccagaataacgagatccggcttcacccgctcgatcagctccagcccctgcaggccgttatcagccgtgcccgcaagctcatactcagaattgatcttttgaagcagtctgctcataccgttccttatgggcgcctcgtcctctacaactactattctcatacgtgtgttcctccttccccggcagttaccgccggaataaacaggtgtaccttcgtatatttatccagtctgctctcgaaataaatatctgcctgctctccataatataacctgagccgctttctgacattggcgatcccaagatggctgctcaaatactccttatcacgctcaaatgctccggagttcagcttcgccagcgtggaggcagtcatgccgtttccgttatccatgatcataatgtggatctgacggtccgtactgcgcatggatatatcgatcttacactccccttctctgtgtttcatgccgtgtttgaccgcattttccacaaagggctgcagaagcagcttgtggatacggcatcctctcagttcatccggcacgtcaagcgttacccggatctcctttccctccttcgtgctctgcagtatgatatattgacgcagccagtacaattcctgttctatcgatgtctcccctccggcgttctttacagtatacctcaggatatccgccagcgcgcccaccatttcgctgatttcaaactctcccctctcgatcgccttccagttgatcgtgtccagcgtattatagaggaaatggggatcgatctgtgcctccagcgcggacagctctgcatttttctgctccagtatggccgccttcacctgctcaatgagcatctcgatatgctgaaccatttcattgaagccggaactgatcttgcgtatctccaccggcatcttctcattgaccgcaacctcagtctgaaaattgccctgctccacttcattcatggccgccgctatcgtgtcgatctctttcaggtacggccttgtaagcacatagccaagtacaaagactccgcctgcaagagcggccgctatgagcagccagaagagcccctgctcatacagcgtgtcgcggtacgccttgagtgactgccggttgtaaatggtaaatccggtcgtttcattcaccgcagaagtatactcgtatccgtcccgtctgatatcttctgctgtttttccgatatttttgttatcccgggcgctgatcaccacgttatcacaaagcagatagttctccgccacatcccacgcatccagcgcctctgtgagcagactctcatttatgctcatcacaaccgtgccggtctctttatgtatatcttcataattcacgagccgccttgctatacgcagcatatatacttcatccccgcctgaggacacaggctctgtcatcccctcatataccgcgccgtgcgtgataaggggcggtgcgacgtcagccgcccatgaactgctcacggaggaggcagacaggtgatcgtaatagatggttctgccttgcgccgttatgatcgtgatgccctctatgccgtcattgcggttgcatatgtggctcagcctccgcctgaggtagttgctgtttacttccagcccgtcctggtctctgttgatctcctccacgagtgatatgacctcatcatccgtgcacagatcatagagcagcgtaccgtacttgtccaggaccatatcgagacactggtccgccttgttcaggttaccgtctatctgtctgtccaggcttgcccgcatgctctgttccagcctgtacatggacagacacgcgaatatgacgatcgggacagccaccgccagaataaagaagggggtaagcttctgccgcagcgttctctctcttttcatcgcacgccctccctgatatcccggatggcgccggcagcctcctttagtatctcgtccacactcctgccgcccacgatgacttcatcgatggcatccgccgccacggcggatactctcggccattccacgcttatttcccgcatcctggccgtctggaagatatccacgcactgacgcatgagcacatcgtccgcaaactgcccgtccatgatatcctgcctcggggcgagcagccccaggccgtctatataggaagcaagcctgtccttctcacttatatatttcagaaattctatggacgccgcctcattttctccgctcatgacaccgaagatctcgccgcccactacggacaccctgtctttgtctgccggcagatatgtcactccaaagtcaagctcattgttctgctctcggatataatcagccatcatgataccgttgaacatcatagccactttgccgtccgcgaactgtcccgccagatctgaaccggtcagactgatactctccttgccgaggcagccgctgcgggccatcgtgccgagcagctcaaaggcctgtctgctttccggagagtctattgcatccacatcccctcccatagaccacaggatcggaagaaacgcgtacagactctcctctccctgcagagcgatctgggcatacccgcatatatcgtccgtcgtgagaatgcgggcagcctcgtagaactcctcccacgttccgggaacggacaatcctgccgcttcaaacagagcggcattgtagaacagaccggtacaatttaacccggacggaagtccgagcacgcgtccctccaccgtacaaggctgcaccgccgcaggcaggtactgcccgagctccccgatctcatctgtcagatccacaaacggctgcatagaattaaaataccggaaatcaacagaatcaacaagcgcaatgtccggcgtctttttgtcggccatgccaagcgcaagctcctttttaaaatcagcgtcaggtatataccttgtcttcacccggatggcctcctgggaatgattaaaatcatacacaagatcttccagcgttctcctctgctgcggaaggtcccagtaatgccacaggacgatctctctttttttctctgcctcagccttctcttcctttttacatcccgtaatactgcctgctgcaagcgcagccaaaagcaggcagaccagaattacagatgctggttttcctgttctcttcaatgccgtttctccttcattcgtatacaagcccgtttcagaatatgtatgtattataccatactttcactgtgaacgcattgtccctcgtcgtggcggctgtgcagatatttttcccgcgtagccattccgccgcggatgtggcgttccgacttgttcatgtccagcactttgcgcgcctggttggccaaagccgggttgatctgtaagagccgctcggtcacatccttatgtatggtagatttactgacaccgaactgctttgccgtctgccgcactgtagcctgatgctcaatgatatagtacgcgatctctactgcccgttcctgaatataatctttcatataaataacccctgcataatttgtttttacaatctatgcacggaaacaggggcttattcgcaatttttcccctgcgtcggcaggggaggcgcaaggcttatgggaaagaaccgctccccggcatgcccgttacttgttatttaccggtgcatatgatagaataaattacaaatgtcaaactgccgaccctgcataagagatattgcctaggttgaaaaaagcctgcgtttgcgcggtgaaaccgatacgataaggagacatgttatgtacaaaattctcgtggtagatgatgaattcagagtttgtaaaatgttagagaagtttatcaacaaaagcggattagacttgcaggtgatcgcttcggtcaacaacggaaaagacgcctttgagatcatttcaaaagaatctcccgacattgttgtgaccgacatccgcatgcccatatttgacggcattgagcttgtgaagcgggtaagggccgccggcaacaactgcgactttatcttcataagcggctaccgtgagtttgaatatgcgcacagcgccatttcttacggtgtcaggcactacctccttaagccgatcaacaagcaggattttctgaattccctgacaaaaatcattcagtcgctggactgcgcggaaaacgccggcggctcctctgataaaccgcacaatgttctcccaagcgccactttgggcatccggcattctcttctgaaagccttatgcaggaacgacggtatcactctgacttccatagaagaatgtaaccgccgttttttatatgcattccgcgaaggacgctttcaagtatttaccggtgtccttgacagcggaaacgaatgtacagattacttaagttcaactttggccggggcaatggataacatcatccatatccttaacaaattctatgcaggccggctgtttgaaaaagaatattacatagaagacaggcttttattctggctcatcaactacgacccgcagaatacggatctggaaaacagtgtggctcatgtatttggcgagatcaaccagatgcttgacaggcagggagacctccgcttttctctcgccgtaagcccgcccgccaagtgtatacaggaacttcccggcgctgccgcgctggcagccgacgccctcaaatgccggatcagaatcggtaacggccgcatcattttcgccgatactctgtcatacccggacgccccgctcgcccccatgcaggctgaaaccgtgataaaatatctggaagcagacgacatggaagcccttctgacggcgttcggccggctgctcgaacaatcccgccgtcagacgcttcatccaaaatacaaaattgatatcctgctcaccctttataaaactctggaagactatgtttccaaatacagctatctgaatgaagtaaataccgatgcgttgtataaggtcattctgaccgcaaaaacagaacagagcatggattcagcctttatggacactctgtccgggctgctgtcacatattgtctcggcaaagcaaaatgtggacatgctgcccatcaaaaacgcgaaggaatatatatccgcccacatcgacaagccgctcaccctcctcgacgtggcggaccatgttcatctgacgccgaattacttcagcaccttattcaaaaatgagacgggcagcaactatctcgactacctgatcgcgcttcgcatagaaaaagcaaaggagcttcttctgacagaacttcccttaagcgaagtatgtaaaagagtcggttaccctgatgtaaagtatttttctaagatctttaagaaaaaagtgggactaaagcctctggactatagaaagtttcatcattcactttaaaggaggaatcttcatttgaatacggtattgctgttatgcgtcatatccattttcctttgtcttctgtttttcctctctctccctgccatacgaagagaccggtatatgcgccatactcttttatcactgaaaaacgggacgttttccgacgctgcccccaattcacatatgacattccagacgcagttagatgaactgctctatctgtataaaaagcattatatgatcagttaccgaaaagacgagctgaacagcagctcgcagcttatggcccttcagagccagatcaatccacattttttgtacaatacgctggaaagcatacgggcacaggcggaactggatgacgctctgcagatatccgagatgacggaagctctggccgcctatttccggtacaatatcaaccggggcggcgatgtcgtcccgctggaagacgagctcgcaaacataagcaactatctgcacatccagcagttccggtttggcgaacggttctccatttcattcatgatcgacggtgacagaaacaccattaacaatcaggcaataccgaagctgacgatacagcccatcgtggaaaacgctatttaccacggattggaggagacgttgacaagcggtaagatcaccatcagagtgacagagacagaaaaacggattcttctgtcgatcagcgacaacggaaaaggcattgattacgaacagctcgaaatgatacaccgcgatctgcaggccgacacttccgcttcgggttcagaacggaccaccggcattgccctctccaatatacacagacggatccagctgctgttcggagattcgttcggcattgctctcgagagcactccgatggttggaacaacggtacatataacgatgccaaaacaggcatatcaggaagaaaacaagtaggtatccttcatgcgaaaagaagttctaagactaaacaacatctatcttacttctaatacttatggttctctgcggaacatatccttccatcttctgcagggcgagtttctcgggttatttggtatcctgaactcgggagtaaaacttcttgtgcgcattctcagggaacaggcaggcatcacttccggctccatataccgcagtgaaacccgcgtcacacagcttctgcccccattgcagccgtgtctggatatcggatatgtgggacagaccggaacactgatgccgggattttcgatcaaagaaaatctcatgatctccaggcgtaccggcaggaaaaaaagcctgctcatcgatgaaaattctctgaacgccgagatcgccgtacttttagaagacctcggtattgacgacttgatcacacctgcggcaaaattaaatgaattatccccctttgaaagacatctcattgagatcgcaaagctcgtctatgcaggcaaagacatcattatgctggacgagatcggatactcctatatggagacagacttccggcggctgtccgttctcattaacaagctgaaagaaaaaaatatatccgtgatctatgtgtgcaattccatcgatcatatggccgagtacctggaccggatcattatactccgcgacggcagaaacgcgggaacgatgtattccgacagcttcgacaggaaaaatctgatgcggatgctgctgggaccgaggcatacttccgcctcttctacccctctcatcaaagcaggaagaccggtgatccggttttcatactacggcagttcctgcctgcagcctgtacggctcagtgtcagtgagagcgagactgtcgggatcttttccttagaaaattcgataccggaagagttggcggaactgatcgtctccgtcaatttaagacgcaaaagactgaaacataaatactataaaacagacagcggctgggaagccgaattatatgatcccggcaaagaactggtcgtaattccgcagaatgccgcggcggaggcgacatatcccgaaaaaagcatactggaaaattatttgcttctcatttacaggccaacttctaaaatgggttgtatcaacgctgatttttcacgttatatggagcatattttagataaatggtacgggaaagagaccggatggtccagaagaacaaaactgaaggacacagatgaagccactcagaaaaaatcagcttttcacaaatggctctttcacagagcgaatttttcgtacatcgaatttcccggcatatatgccgacccattgctccagcagtctatatttgctttgatccacgaaatggcggagcataaaatgggcatactcatccgttccaacaacatatacgagctgctcacactctgcagcaaacttgtgatcatatcgaaacagggacggtcggtcgtcctgtcgagggaggaggctctttccatcgacctgtttgaacttctcatagatatgaaatgaccgcttacgccttataactttttatcttttttctgcgccctcctgctccggtcctctgcatactgtcgatccccaccgcaaagagcagcacaagacctttgatcaaaatctggtaatattcgttaaatccaaggatcaccatgccgtttgacaggaagcccatgatgagcgaaccgacgataacagaagatatccggccctcgccgccggtgatcctcaccccgcccacgactaccgcagtcaatacttccatctcataccctgacccggcttttggctggcccgagttcactctggccagcatgatgatacccgcgaccccggccagaaagccgttcatcgtgtacgccgcgatcctgacagaatccgtatcgatgcccgacagtctggtggcctcttcattacttccaaccgcataaaaataatggccgagatacgtttttttcagcagaaattcaccgagcgcgagtacgacgaccgtgatcacgatcggaatgggaatgatcccgaaaagcatggcgcgcgcgatctgcttaaaagacggagatatgccgtataccggcttgccgccgcagatcgtataggatatgccaaggatcacctgctgcatggcaagtgtcccgatcagggcgggaatccttgttttcgtcacaataaaaccattgagaaggccaaacagagcgctgcagacgagtccgagaaataccgcggccggcagaggcagcgccatctttgtcgcggcaagagccgtaaacacaccgacaaatgacaagatcccgctgaccgacagatcaatggcgccggtgagcaggacaaagagcattcccactgacataattgtcagcatagacgtctgcctgaatatcgtcataacattatcaaatgtactgaagctggattcaagcagtgacatgagaacgacgatcgccatcagggcgatccatctgctcagcatttttactgccttcttcacttttccttctcgctccatattccgcctccgatgccgctgcctatttcacgatatccagattatccttcataatcggaaccatctgaaatgtcaccactctcttttcgcctggatctccaaggtatgcgttcactgccgccataaacatatcctcgcctgcctgcttcaggtcaaagtagactgtcccccgaaagacgctgttttccctgatcgcctttatcccttcttctgtcgcgtcacagccaaacatcgcaatggaaggacccgtcttgtgggctgattcaaacgcttcttttaccccgagtaccccgttgtcattcacccccgcgactacgttgacgtcggggtgcgcctgcagcagtatctcgccaaaattcacaccctggtccagcagccccgcatcctgcctcgccactattttagactccggcgcccgctcccgtattccttcttcaatataatccgccctgttgttcagaaaatttatgagtgaataatcacagatcgcgacattcgccctgccgcccaggttttcattgatccagtcccctgccatatgcccgatggcaaacccgagtttctcattgtccgccacatatacgtacgttgccgcgtcactgtaattgtcgtatgagatcactatgatacccttttttaccgcttcacttacgacatactcgctggcgtcctggtcaaaattctgaaaaattatggcatcacatcccgccgcaataaaattttccagcccttccaccatatttcccgggtcgctgtccgatgaaaactcgatgatctccactcccagtttgtcggccttcctgtgcatctgatccagcatttcaataaaagtcgtatgtgtcatatccgacatacagacgccgatcttcattcccttagcagttttctctttatgggcggtatcttctctaaaactgcccgcaaaagagcatgccgccaaaaagcagcttaagcatatcacgaaacagacacgtgtgatttttcccggcatactctctcacctccagactgcttatcatgcgtggctttgtataaaatctccgatggccttataggcatcgatcgtttctttcagaggacggtgtataaacgcatggatcatgccctcgtaatatttatacgcaacatctgtcccctcgtcaatgagacgcgccgcatacatcagttcctgatccagaagcggatcacactctgccattatcataagcgccggcggaagattcttcaagctgccggcacacaaaggcgaggcataagggtgatccgactgttcctcatagtcgtcaaagtaataggacgtaaacttctggccgctcctgtattccagaaaatatccgcttccgtagcgctgctccgacttaagaggcagttcaggattcatgatgaccgccggatagataagcacctgccccgcgatatccttacgccccctgtcccttgccatcagcgcggccgcagccgcaaaattaccgccgctgctgtctccgccgataaaaagctttccctctgccagtttctctctctcaatgtgggcaagcgcggcatagcagtcttccaggcctgtcgggaacttatactcaggcgccagacggtagtcaggggcaatgacccttacctttccaaacaaagcaatgcccctgagcacctggtcatacacctcgtgatcattcatactccacgctccgccgtgaaaatacagcaatgtgcccgccggatcttcacgtggatcatagatcgtacacgggatctcatacccctctctctcataggggacactcctggtcctgatgttcatcatatcctgccagcacgttctcctcctccactccgaagtaaataaagcgaccgcctgcattttcagctgtgtgcgtgatacttgcggatcatccatatccatgatctctgcaggctcaatgatcacttccggcgccacttcattatattccggttcaaaaagcttatggtaagttctgatcatcgttttccctccgtatatgattttgttaatatcactttttctttactttgccggaaccgccttttccgtgacgatcttcatcttggcgccggcggcaatattcttctggatcccgtcgaagcagacggccgccagaaatacaagtccggtcacgatcttctgccagtatgcgtctatgccgagcatgatcatggaagtgttcagcacacccatgataagtacgccggtaaacgctttgcttactttcccttcaccgcccataagagagacgccgccgataacagccgccgtcaggcattccatctcccatccgtccgccgatatctgggcggaacccgacgccatccgggacatgtagatgaccccgccgaaaccggccgcaagggcagagatcccatatgagatgatctgtacggcgcgggtgttgatgcccgatactcttgcggattctatattacttccgacgagataaaaatatcttccgaagtacgttttattgagaatgaaccacgcaattatgagaatgaccgcaaggatgatgaccgcaaacggtatctggaacccttccggaccgacgcgcccctgaccgagaaaggtaacggtaatgtctgccggaaaggtcagatagctgccctgcgacacaacataagctgcccctgacagaatccccatcatggcaagcgtccctatcatcgggaaaatcccggtgctgacgatgatatagccctgcagcatgccgactaagatacataaaacgagcacagccgcgatcgcgagcggatacggcataccggccgacacaacaagccgcactaccataactcccgcaaatgccatcatcccgccaaccgacaggtctatgccggccgacagcatcacgaatagtattccggtcgtcaggatccctaccaccgacacctggtccaatatgttcataagattggaaaagcttaagaaagcatccgtctccagtatactcatcagtataagtatggctgcaagaaacaccaccacagcatactctttaaaatattttttcaccgtattcataagcacttactctccttctgttttaaacgttccccggacgcaagtttcataacgttcacctgtgaaaactccggtttctccaaaatacccgaaactctgccttcatacagcactgccatcctgtcgctcattccaagtatctcctccatctccgaagatatgatgataatgccgactcctctttctgcaagagcgttcataagaagataaatttcgtgctttgccccaacgtctattcccctcgtcggctcgtccatgatcaggatctttgaatcagaagcgagccactttgccagggcaaccttctgctgatttcctcccgaaaggtttttgacgagctgttctacggacggcgctttgatggaaagagacttctgaagcccgtccacgatctcattttccttgtcagtgtcaatgatgccgagaacccctgatatctgctttagaatacttgcggtaatattccatttaatggacagggaaagagagacgccctgagccttcctgtcttcggtcagaaatccgatcccgttggcaatggcctgccacggcgatttgatattcactttcctgcccttgataaatatatcgcccgactggatcttatctagtccaaacagcattcttgcaagctcagtcctcccggaaccgacgagaccggcgagacctaatatctctccctctctgagcgataaagagatatcccggtctcccatacctgtaattttgttcagttcaagcaagacgccgccgggagctgtctttctccccggatacgcctcggacaggctcctcccgaccatcatcgatataagctggtctttggaactgtccccggtgctgatcacccccacgacctccccgtccctcattaccgtaattctgtccgtaatttcaaataactcctcaagacggtgggatatatatacgatcgtgacgccgctttcctttaactgcctgatgatctcaaacagcgccttcacttcgttgtcggtaagcggcgcggtgggctcgtccataatgatgagcttcgccttgcttgcaatggctttggcgatctcaacgagctgcatcttggcaaccgaaagttctttcacaagaacagcaggatcaatgtccacatcatacatatcgaggatttcccgcgctcttttattaagttccttcctgttgaatataataccatgcccttctttttctccgcagaaaatattctccgccacagacagagagccggccagattaaactcctgatagaccgccgctatccccagtctcctggactgtgccggtgtgaccatcctgtatgtactgcccgcgatctcgatcacgccgctgtccggcgcaatggcgcctgctatcgttttgatcagcgtagattttccggcgccgttctcaccgatcagcccgtggatctctccctcttcaacctcgatcgagacatcattcagcgcaatgacgcccggatatgttttcactatattgttcgtctttaaaataacgctcatagtatcctttcctgtgcggaaccttacatgtataagattccgcagtcagttaaatctaattttcattaccgcattttacagaaaatcgtctacattatcgatcgtgaccggttccggcacgaacaggtaatcacgtgtttccaatttaccgttcttagagacctccagcgcattctggatcatattctttgtcacgctgtccggatcactcgatgccgtgcctctgtacataccgccttctttgatcgcctgaagcgcaggttcatttgcgtcgacaccgaagatgcccacatggtcctgatccgccttcccttttgacttccacgcctggtataatgcataacagcctgcgtcgtttatgcccgcgaccgccttcatatcaggatattttgtaaaccaggcattgcccaccgacgtaccttcgtcttcaagtcctgcctgctgggaatctacgatcacaacattcggagcttcctccttgatggcagcctcaattccctttcttctctctactaggaatgggaacgggtcatagttaaggatcccgcactgcacttcttcagagctgtcaaacgtcttattcacccactctgagagcatcttgccgatcacctgtcccatcgcatagttgtcggcgccgaagaatccgtccgccccctcgatatccgtatcgtacgcaaagaaatatacccccttgctctgtgcctgctccatggccggtttcagggccactgcgttgtccacatgacagatgatcacattgtatccgccgtttgcaaagttattgatcgcatcaattttcttggcggaatcaatacattcctttgtcgttacctgtacgtttccttcttcctttgcatatttctcaaggcccgtctttaactgggcgaaaaagcctgccaggtcggaggggataaaaccgatctttatcgtatcaccctctgtctttgccgcctttcctgaatcagagccttcttctttggctttcgacccgcaggctgccatggaaactaccattgcggcgcacagcagagcgccgatgattctctttacgtttctcttcataatccattcctcctttattttgtctgaattgttaagtgcataatagattaggacattttcattgtcaataatatcgtaaataagtcccttttatcgtaaatctttatacattttaaccaaagacaggcctgtttttacctgtcttccaattttatctaaaactatttttccggttgacatctgctcctcatatgttataatgaatccgtcaaatcattaaatattagtggaagaggtaatttatgttaattgtgtcagtaaaggattatacagcgaaataaataagttgtaggggtacttatgtccagcggactcgtgtactctttatgccggtacgtctgatctgccggtatatccgccttactttacacattcatacacttccatgtttataaagacgccgaaggggtatcgccgaatgcacagcttgtaagggctgtgttttttgttccctgtttccggccgtatatattcaggaccacagaagtcgtatgccttaagaaggtgtaaggagctttatgtggtcctttgttattataaaaattgcagccggcatccgtgcgcagggacacatgccctgtacaccggcgccgggaaaggaataagaaaaatgaacaataaatctttagaactcatcggatactatgaaattacagaaaaactggcaaagcaggccctgaccgcccgcgcaaaagaacgcgcccgcgcgctccaccctttcctgtccgagtcagaactgcgcaaaaatctgcgggagacgacacaggcaaaagagatgaccggactgcttgggcttccgccgcttcccgccatggaacatatcgaagcatttatagaaaaagcggtgatcggggaactgctcatgccggaacatctggaggaaatggggctgtttctcaatgcggtgcgcaggctgaagctttatctgaaaaaaggggaagaacagcacatacagatcgccttctataatgacaatctggtgctcccggaagaattaaaagataacattgaacgctgtatacgggcaggacgtgtggacgatcatgcctccggttatctgaacgatatccggcgccagataaagacctcagaggagaagataaacgagaaagcggcgcgcgcgctgaaagcagccggcgccagcgtcagtgaatcctttatcgtacagcggaacggacggctgtgcatccctgtcaaaaaagaatgccgcttgcgggtgcccggcagtgttgtagacaaatcgtctaccggcgccacggtcttcatcgaaccggagaccgtcgcttcactccgggaggaactggaaatactgaagatacaggaagattccgaagaacgccgtatcctctatgaactgcttgaacagatcgccctgaatgaggaagcgctgagggaagatgtccgggtcatcgctctgctcgatttcgtatttgcaaaggcgaagctgagctttgacatgaaggcggcagaacctcacattaacctcagccggtatatctccgtcaccggagcgcggcaccccatgctggataatgagacgtgcgttcccctcgactttgaggcgggacgcggtgtcagcggcattatcatcaccggcccgaacaccggcggaaagaccgttgcgcttaagaccgtcgcgctcataagcgccatggcatgcgcgggcctccatgtaccgtgcgcctctgcggacattgcgatgaacaatcagatcctgtgcgatatcggtgacgggcagaacatgacagacaatctttccaccttttccgcacacattaaaaatgtccttgatatattaaagcgggtgacgaaggacagcctggtcattatggatgaactcggctccggcacagaccctgccgagggaatgggaattgcggtcgccatactggaagaactgcgcaaaagcggcgcgctgtttttcgtgacaactcactatccggaagtgaaagaatacgcgggacgtcatccggacatagcaaacgcgcgcatggaattcgacaaggagacgttaaagccgctctaccggctcaccataggcgaatccggagacagctgcgccctgtatatcgccaaacggctcggcgtgccggataatatgctggcggccgccgccagagaagcctacggtccgcgcgcggaacatatcatctcggagcttgggattcacagctcaccggagccgttccgcaagatatccgcaccccgcttaaagcctgtgccggatataaagcttccctcatcgcagggccaggaatttaccaggggcgacagcgtcaccatactgccggacaaaaagataggcatcgtcgtccggcctgcggacagccggggtaatgtcctcgtacaggtgcagaaagaaaaattttatgtcaacagaaaaagactggagcttaaagtggcggcctcacagctttatccggaggattatgacttttctatcatcttcgattcagcagagcaccggaagatccgtcaccagatggaacggaaatatgaggccggccttgagatagagtccttcgaccgccatcatccataatttacacaataagtattttttttacttctttttattgatttaacattaacggtaatctacaatgaacttaacagaacttattagccgttaagattgtttctgtaagggggaggaaccaatggaacttcatgaaggtataccagattcatttcatatagatacggacgccttttataatgccatcgtcaacagtacggaggattatatctatattgtggatatcaccaaagatatctccctcgtgtcggagaatatggcgcgtgactttgatctgcccggacgtctcgtgccgggacttatccctctgtggggagaactcatacatgagaaggacagacagcgctattatgactcgatcgatgagatgatggcgggatatacagatatccacaatgtagaataccagatcctgaacaaaaagaatgaatacatctgggtctgctgccgcggtcttcttacgcgggacgaaagcggcgcgcccaccatgttcgcgggcgtcgtgaccccggtgggaagcaagggaaagatggaccgcacgaccgggctttttacacaggaggaatgcaagaaccatattgaagcctatctgaatctcggcaatacgagcggtgggtttcttctgcttgggatcgatgattttaagcggatcaacaatctgaaaaatcatacattcggcgataccgtactgcgcaagatcgctcaggatatccagcatatgattccgcacaaagcggagatcttccggttcgacggcgacgaaggagcagtcttctcacccggagccactctggaggatatgtacgacttatattccaagatacatctctatgccaacaaagaacatgagatcgacggcatctcctactactgcaccatatcgggcggcgtcgccatgctcggcacggatgcggacaattatctcgacctcataaagtgtgctatgagcgctcttgaagcgtcaaaaaagaaggggaaaaatatgtgcaccgccttcacgccagctcttttgcagtccaatctgtatatcatggagctgaccaatgaactgcagcggtgtgtgatgaacggcatggaaggcttctccgtcgtatatcagccctttgtaaagaccgacggactctgtctgaaaggcgcggaggctctgcttcgctggtcctctccggccgtaaaaaaagtgggccccgcggaattcatcccgcttctggaatcaagcggaacgatcgtccctgtcggcaaatgggtgttggacaaggctttctgcacgtgtaagaaatgggtcgccagatggcctgattttgtcatgaatatcaatgtgtcttacgtccagatcatcgaaaaggattttgtcccttatattgaagagctgctgagaaaatatgaccttcccgccagacacatcgtgctggagatgacagagagctatttcgtgactgatatgccggcgttaaagactacgttccagcgcctgcgtgatattgatatatgcatcgccatggatgacttcgggaccggctactcctcacttggaatgctttcccagacgctggcggatatcgtcaagatcgaccggatgttcatctcactcattaatgataaagagcacttcttcaaccgctctttcatccaggcggtcatcaacctgtgccacagcatcgggatctcagtctgcgtggaaggcgtggaatgcgcagatgaactggataccgtccagaacatgtctgcagacagtattcagggatactatatctcaaagcctgtctcacaggatgaatttgaagaaaaatactgggacagttaaataaaattcagataaagagcgtcgtattatctctacatgaacttggattcagaaagggaagggtcttcatatgtatcaagaaacgcgtaaaatcaccattttctctgaacataccagcttggaacctctgatccggtcagccatggaaaaagggcccgttgcttacaccatatctacgacatcgtctatgcagactgattggcaggacagtgatatcatcttgtgtgatattcctgtagaagagctggcatccgttaagaaaaagatgagatcagattcttatctgctctacatatacagccccgcggatgatatatgccgggataaggacacggcggccgatgaattattcgcccggcccgtcagcaaagactatctgcagaaacggatacggcacatttgcggtgagataaagctccgggcggacgaatggctctcctccacatatctggacgtactcatcgacagtatgccggatctcgtctggttcaaggacaacaacggcattcatgtaaaggtgaacaatgtcttctgccacaccgtcggaaaagagcggaaagacgtgacgggcaaagaccactgtacgatatgggatgtggaagtggacgactgcgaggcgacggaggcgatcgtgcgcagggaacggcggacgtgccagtttaacgagcttgtcaagagcagcggcggcatgcgccagttccgtacatacaaatcgcctctctttgacagagacgggaatattatgggaaccgtgggcatcggacacgatgtcaccgtccttgagaatatgagcaatgagatggaaatactgctgaacagcatgccttttgccattctgttaaaagacagcgccggcgccatcgtggatgtcaacttaaagttcgaggaatattttagttcccgcagagacgatgtgataggcagaccgttccaccaatggcatgaaagcatgttccacgggctgtcctccgtcaaaaagaacgacaccgaagaaatacatcttcccgaagacgacggtgagcggatcctcgagatcacccacgagcccatatatgatatatttgagagcattgtcggggagctgaccatctaccgtgacataacggaagaatctcttcttaaggaacagctgaacaataactcaaacacagactttctgacaggcctgtgcaacaggcgctttttctatgaatacttttctgagactcacagctacgagcagatctccattctgtacgtggatctggaccattttaaaatggtaaatgatacttacggccaccagatcggtgatgaggcgctgatcatggtcgccgcaactttaaagaaatgtttcccggacaatctcattgcgcgcatcggcggagatgagtttcttgtcgccaggacggagccggtggcagaagaagaacttgtccgccaggcagacatgctgatcgacgggctgcaggacgccttcaacacgaacagctgcatgaaggtcctgtcggcaagcatcggtatcgcatatacgacagaacctgccaaaaagattgacgacctgatcaaagaaagtgacatcgccctctataaagccaagcagtccggccgttcccggtgctgtgtataccgttaaaaagcaaaaattccccgggatcggtacaaaaggatcccggggcttattcatattatttatcggaatctgatttatctgtctttgctacctgcacacagttctttgcaagccagtctttcaccagattattcaatgccatctctttcaagtcgtcttcctcagccgctttttttaatgcgtctgcattttcataaccatatgtctcggccatttttttaagctgttttttgtactcgtcgtccgacagcttgatcttctctttatctgcgatcgcttttgtgacaagcgtctgcttcacactggactttgcagccttgttcacctgttcttcaaactcttctaccgtagctcccatctgttcctggataaatgtatcatagtccatctggtaatattctgccgcatctttatactgctggatcaggttgtcggtgatctccttgacatccttcttcgggtatttctttacttttgatttatcaagcactgcttcccacactgcggaggacagattgtcattgtatgctgtctctgcctcttcctcgagctgctttttaacttcctttttgtattccttgactgttttggacttctcagatacggactttacaaacttgtcatccagctccggcacttcatcctgtgtgatcttgtttaccgtgatcgtgaacacaacgtcttttccggcataatctgcattgccgtaattttccggaaatgttccgttccagtcatatgtctcgccgatattatggccgatgacactctcctcaaatccttcgataaatacgccggaaccgatcgtgagcgggtaatcctccgcgctgccgccgtcaaaagtctctccgccgatctttcccacataatcgatattgaccgtatcaccgttttctaccgcgcggtcggtgatctccttctgggtcgcctttgattccagcgtggactggatggcgctctccacgtccttgtctgtcactttggacgctttctcaacttcatcaacctggattcctttatatccttcaactgtcacctcgtcggtatcaatctggttgcttcccgcacatcctgcaagtatcatagaacctgcgcataccaacgccaatgcagcaactaatttctttttcataaaatacacctcatcgattctttatcttttatgtccctctgtctgaaacatacactattagttatagcacattccctataaatttgaaacctttttcacacttatttcacttttaggaaagatacggtcacaacaccggcgacagaagacggcagaactgctccttgacgcggatgacaagtccccggcgttcatagcccttccgcgttatgagcgtacttttcgggatgtcattttcaaacgcctccatcagcttctccgtcgtcctggcgctgtatacgaccgcgttcacctcaaagttcagggaaaagcttcgaatatccatgttggcagtcccgatacagctcacaagaccgtccacacagagacattttgtgtggagaaatccgttgtcgtaagtgtagcatctcgcccccgcttctatcatctcacccgcgtaggagtaggtcgcccagtagacgaacgggtgatccggcttgcacggtatcatgatgcgcacgtcgatccctgatctggccgctatgacaagtgcgtctctgatatcttcgtcagggataaaatacggcgtctgaatgtagatactgctcctcgccatgtgaatgagacgcagatagttgttgcgtatctcctggctcctggagtccggcccgctcgatatgatctgtaccgggtcgcgcccgttgcggatataggtcggtatctcgaagagacggtcctccagaaagagattttcccttgccgcatagttccagtcaagcacgaacctgaccgcgagggacgtaacggctgagccttcgatacaaatatgcgtatccctccagtaaccgaatttcttgtccagtccaaggtactctctgccgatattgaatccgcccacgaacccgatacgtccgtcgatcacaacgatcttcctgtggttgcggtaattgacgcgcagctgcagcttcccgagcaccgccgggaaaaactccgccacctcgatccccgccttttcaagcctcacccagtcagcgttgtgcataccgcggcagcccatactgtcaaagagcacccgcacttccacgccctgtctcgccttgcggacaagcacttcctctatctcctgccacagttcatcgtttcgtatgatgtaatactgcagatgaatgtagttcctcgcatgctccatctctgtcatgagcgcctggaacttctctctgccgtccgtatagatgcggatgtcattattgtccgtcagcacggcttccccttcattcaggttgtacaggatcaggctcttgaaccgctcaagctccggatcgcgcagcctgagcttccttcggtatatagactcctcctggcggcggaccgcatacttgatctccccctctatctccttcatcttgaacatccgctccttgcggaagttttgtccgaggacgagatacagtataaagccgaggatcggaacaaaatagagcagaagcagccatgcccatactgtcgtcggattcctgcgctggaaaaaaatgatcagcagggaaaatattatattgataaacagcagatggtcaatgatccaccagtaagcagtcccgaccgcctgcgcggcattttgcatcataatctcactcccccataatgtacgcttattgaacttcctgacgtatgtgttctattataacgtcatctgacgagaaaagtaaccctaaaatgtcaaatctcttgcacttaaagtaaaagaatgatacaatgtacatcgtgaaaaagtctatttgtaggaggttcccatgagtacattaacgatcgtactgcttgttatcttaattgtattagttatagcatgtgttgtattatattttctcggcaaaagagcagaaaagaagcaggctgcccagcaggaacagcttgacgcggccgcgcagaccgtatctatgcttattatcgacaaaggtaagatgcgacttaaggacgcaggttttccgccggtcgtagtggaaggtacgccgaagtatctccgccgttccaaagtgcctgtcgtaaaagccaaagtcggaccgaaagtaatgacgctcatgtgcgacgctcaggtattcccggtcataccggtcaaaaaggaagtaaaagccacggtaagcggcatatacatcacaggagtcaaaggtctcagaggaccgcttgagacgccgccgaagaagaaagggttcttcaagaggatcacgggcagatagtatgcagacgtataaaaagcattgggactagcgttccaatgcttttatattcatatcaatattacagtccgccactttttcgtcattgatatcgagcgcatagttaacggcgatcgctatgttattctccgtcacatctacgtctatcttcctcgtgtggatccctatgagcagttctccgtaaggcgtctcgtactgagtcatgttaatcttatctttctcaaataccatatgggcgctggcaagcccgcttttgatgatctcaaacacgctgtctcccgtgatctttatcgtatttctgacggtgcccgccatcccctccacaggctcctcatatatcacataatgctttccgtttttgttgtagtaaacggccggggtgatcacctctatcggttcgttctcatctgcttcggcacctgccgcgtcaaagtgaagtccggaaatgcttaacagtacatctttcgtcatattttcacctaataatcctcaatattgatttgctgaatggtctctacgttgtacggcagtatagagttggcaaaatgcttaaacttctcagccgtatcgcttacatagaactcgtaccgggcaaggcttccggaattgttctccatgtcatgctccgcaagcagagctttcagatccatggccgtctcgtaggccggatttacgatatttacactctctccgaaatactccatgatacgggacctcagaagcggatagtgggtacagccgagtatcatcgtatcgatgtccgaatgcttcatctcatccagataatattcgataatctcatccgtgacatggtgcttcgcaaacccttcctccaccagcggcacaaacagtgggcacggctttcctatcaccgaagcctccggctccatatccgtgatgaccttggagtatgtatgactctggatcgtcgcctccgttccgaccactcctatctttttgctcttcgtctccttcaccgccgcccgcgcgccgggtacgatgacacctatgatcggaatgccggactcctctttcacgacgtccagcgccagtgcgcttgctgtattacaagctatgacaatggccttcacgcccttcgtctcaagaaagcggatgatctgccgtgaaaaccggattatattatttctggacttgctgccgtacggaactctggccgtgtctccgaaatagacgatattttcatccggcagctggcgcatgatctcccgcgccacggtaagtccccccacgccggaatcaaacactcctatgggcgccgtcctgtctttatttctgttcaatttacttccctcttttcactttgttcgtatgtctattcacctgtgccgtttgaaaaaagagaccttcagtaaaagaaaactcttcgtcctgaacgtctctgttgtctctcaaaactgatattctaaagtgccagctctctcgcgatctcatactggtaggtcggaatacccttcttcattccaagcgcctcgtcgatgtcaaaatccaagtactcgccgtgtctgtaaccgacaacacggttggacttgccctcgatcagcagatctacagccatagcgcccatgatagacgcatataccctgtctttgcacgtcggacttccgccgcgctgcatgtggccgagaaccgtggctctcgtctccatgccggtggcttcctcgatcctctttgccatgttcatggaatcaccgataccttcggcattgatgataatatagttctttttaccgcgctttctgcactcctgtatatcctggactatagcgtcctcgttgtaatcgtgttcctccggcatgagaatacgctccgcgccgttggcgatcccgcaccagagtgcaaggtatcccgcgtctcttcccatcacctcaatgatcgaacatctttcgtgggatgtggacgtatctcttactttgtcgatcgcttccatggccgtattgacagccgtgtcaaatccgatcgtatactccgtacaggcaatatcaagatcgatcgtgcccgggagtcctattgtattgatcccaagtctggacagcttctgagcgccggcaaaagaaccgtctccgccgatgactaccagaccgtctattccatattttttacatatcgccgcggctttctgctgcccctcttccgtgcgcatctcttcacatcttgccgtctggagaatggtccctccgcgctgaatggtatcggatacatctctggcggacaggtcgatgatctcttcattcaaaagaccctgatatcctcttctgatgcctcttactttcaagcctttccctaatgccgtccttacgaccgcgcggatagcagcattcattccgggggcatctccgccgctcgtcaaaacgcctattgtacgaattattttgtctgccatttcaattcctccatcgtatgttttcattctcattctttctcttcttcgtggttcattttaccttatctaagagatgttttcaatgggtttttctataacttttacacaagattccccaaggtaattcgtcaatctgcttaaaatcccgggctccacacagatattcctgcttctcgggagccgtttgaccgccttttcggccttgcagtatatcacgacctgatcgtctccgtcagactccttgatcagatcataaagctctgcttcccgggcgagaaacgccgccttattatcgtactggagccagagctccttcttcgtctgttcaaacggaacgatgtcgtcacagataagcttgctcgcggcttcatcctcctcggagacccttccctttacaaataccttattttcttctgtgaggtacctctggtgcttctcgtacactttcggaaacacgacgacttccactgtgcccgccaggtcttccagtgtcagaaaggccatcgtcttattgttctttgtatactttatcgtcttgtccgcaatgatccctcccacgacttcctgagccccgtcgttcaccttcgtctgtccggtctcctcatccagctgaaaatcaagtgttgttctcgttatgcttttcttccacttttcttcatactcttccataggatgcccgcttaagtagattcccagtacctccttttcaaaagagagcagattttctttttcatattcccccacgtcgggcagcggaatatcaaactccgctttctggtcttcatccaccatatcaaacagagtcatctgcccggtcatggaatactttctctcctggtttacctggtcgaggatctgcacatagatgatcataaactgctttctcgtcccgccgagactgtcaaaggctcccgacttgataaagttctcaagcgtccttttgttgacttccttcccggacatacgctcgatgaagtctttcagcgtcttgaatggaccgcccgcgccgcgctcgctgacgatcgcgtcgatcaccggcctgccgatgctcttgatggcagccagcccgtaacggatgcgcccgttctccaccgtaaagttaccaagacctttgttgatatccggcggcatgatctcgatccccatctgctggcggcacgtgtagatatattccgccaccttcccgggattatcgatacacgatgtcatgagcgccgccatgaactctacgggataataatatttcagccacgcggtctgataggagacaacagcgtatgccgccgcgtgcgatttattaaacgcatactttgcgaaatcgatcatctcatcgtagatcttgttggccgtcttctcatctataccattttttatacagcccggcactccctcttcctcattgccgtacacgaagttctgccgctcttttttcattacgtcgctctttttcttggacatggcgcggcgcagaaggtcgctccgtcccagagtatacccggcaaggtcgcgcacgatctgcattacctgctcctggtatacgatacacccatatgtcggggccaggatcggctccagctgcgggcagtcgtacgtgatgctctgtgcattgttctttcctttgatatactgcgggataaaatccatcgggcccggacggtagagagaaatgcccgcgatgatatcctccaggctctgcggcttcagctccttcataaagctcttcatcccgccgctttccagctgaaagataccgtctgtccgtcccgtcccgatagagctgagcactttcttatcgtcataatctatgttgtccatatcgataggctgaccggtacttacacccgcaagctgagccgcgttctgaatgaccgtcagcgtgcgcagcccgagaaagtccatcttcaatagtcctagctcttccagcgtcgtcatggtaaactgcgtcgtgaccgatccgtcggagccgagtgacagcggtacatattcatccaccgccttctggctgatcacgaccccggccgcgtgcatggacgtatgccgcggaagcccttccagccgtttcgacatgtcgatcagttcccgcacctgctcatcttcctggtacactctcctgagctccggattcatggcgagcgcacgctcgagtgtcatgttgagctccgtcggcaccatcttggcaatgttgtccacgaacgcatacggcagatccatcacacgtcccacatcccggataacaccgcgggccgccagcgtaccaaaggtgacgatctgtacgacccggtcggagccgtacttttctaccacgtaatctatcacttcctgcctccgctcgaagcagaagtcaatatcgatatccggcatggacacacgctccggattcaggaaccgctcaaagagcagctgatactttatcggatctatactcgtgatgtccagacagtaggacacaatactccccgccgcggaaccacggccgggaccgacgatgatgtcgtggtctttggcatacttgataaaatcccatacaatgaggaaataatctacgtatcccatggactgaatgacggacagttcgtattccagccgttctgccagcgcctcctccccgtccggatagcgtcgcttcagcccttcaaagcagagctttctcaagtattcccatgacgtatatccttccggcacgtcgtatttcggaagctttgtcacgccaaattctatctccacattacaccggtccgcgatcttctgcgtattctccagcgcctggagcgcatacggaaagagccggcgcatctcctcctccgacttgatataatactggccgccctcgtagcgcatacggtcttcgtccgccagtttctttcccgtctgcaggcagagcagtatgtcgtgaggcttgacgtcgtcctcgtatgtatagtggatatcgttggtggccacaagctcgattcccgtctcctgggaaagtctgagcagagactggttgaccattttctgctcctgcatgccgtggtcctgcagctcaaggaagaaatttccttccccgaagatgccctcatagcgctgtgccgccgctttcgcctcgctgtacatcccgcgcatgatattgcgctgcacttcccccgccaggcaggcgctcagcgcaatgatcccctcatggtattcttccagcagttccagatccacacggggcttataatagtacccttccgtgaatccccttgatacgagcttcatcagattatggtaccccatatcgttctccgccagcagtacaagatgataatatctgtcctcaccgctgccgcccgcctctttatcaaaccgggaacccggggccacatatacttcacagccgaggacaggcttcactcccgcctccttcgccgcccggtaaaaatctatgacgccgaacatgacgccgtggtctgtgatcgccacactgtccatcccaagttccttcacccgggaaatacactcttttatcttatttgaaccgtccaggagactgtactccgtatggacatgcaaatgtgcaaaactcataatcactcctgttctgtaactgtcttatagtttctcatagaataactatatcaaattttgcgtaataagaaaagacggtaaccgtattctcccgaaacgcaagaatactgccaccgcctgaactgctttttcgcttatctataagttttactgtctagccgttgatcataaacgcgaccagcttgtcgatatcttctttttcatgcgctacgatttccagctccgggatctctccgttggaaaagatgtttgccatagacacatactgagataatttagattttaaattaagtctgtctccttcacctgttactaattctaccttacctgagcaactgtctactacttcgaaaaacttttcgatatttgtgatattctgaactttcatcttgttactctccttttcttttctactctttttctttttacaccctcaatatatacgaaaacggtgttaaaatcaaggttattattgattttcggcgctttttaaaaagtgcacaaattttcacccatttttttggtaattattacttcataacaatggaattttccttgatctcaatctttccttccttcaaaagtcgtcctgccgcacgtttaaacgcgttcttgctcagaccgaattccttctttataagttccggctccgccttatcggtaaaggggagcgctcccccgtattcttccatccgttttatgatggcggcggcatctgcgtccatctggataaaggctttctcacggatgctcagatccagctttccgtcctcatgtactttcaccactcttgcttctattttatctccgatcttcaggctgccgaacgcctcccgcttcggtataagggcggaataccggtcgtccacggctacaaacacgccgaaattatcgctgaattcatagaccgtgccgctcacatgatcttcttttttatacggcgaatcggtgcgcagcctgtcgtataccttcatcgtcgcgcacaaacgcctgctcttgtccacatagagggctgccagcacccggtctcctttggccaccttttctgtctgttccttgaacggaagaagcaggtctttttccagcccccagtccagaaacgctcccatgcggccggtgtccgccaccgtgagcgccgccacttccccaagcgtgagcgcaggctcagctgtcgtggcgatcagccggtcggacgaatctttatagagaaatacttcgatctcatccccggctttcacacccgggggaacctgcttcttcggaagcagcactttctcttcctccgtgccgaggtatacgccgaagtctaccagctttacaacgctcagtacctgtttttttcccaatccattttctaatgtcatcctatgttctcctctaattctactactgcataaggtttcccctgtgcgtctgtaagtgacacaacgatcctgccgtcctccctggctaccctcggcctgatgatatctttgcagactgccgacttcctgtattcgactctcacctggcgcacgcacagctcttcttccagcgcctcaagcgccatctgcacatactggcagttattgacatgttcattcgtatcaatatgatactttcttacctgaaacgcttccttctcctcccaattttcgggcaggcttatctttctcggcgcgtactccatatcaagcggctcctcggccccatacgcctctatctcctccggcagcggccttaccggccttcccttcaccatatccatgtacacccagacggaattggcatacgccgccgtcctgccgtccccgtccgtcatccggaagttacgcaggccgtacagtccgttaaattctgttgcccatgtgctgaccgtgatctcttctccaagcttcggataccgcttagcgatcacctgccaggcattcagcacccaggcacgtccgtgctccgcaaagtagtcgaccccgaggccgaggctctcggaatgaaacgtgctgcagtcctgaaaataattgatgatccccggcagggtgatctgctttgtatggtctacctcactgaaccttactctgctgtcaaatgaatacataacttactcttcctgtcctttctgcgcgctcgccacaaagctcatctctacggttatcacacactcgtatcttttgtctgtcttatggagctcttcgatgagcgcggctcttaagctgtcctgctgttctttcgtgtactcccttggaacgaccagatcgaagatgagattgatctgttcctttccgtctaccatgcggaaatcgtggacgctggccctcctgtcgagccgggacaccgcctcttccacatgatttcgcgccacaagcacctgctcatttttggtttccacgggatccatatgtatcacaagaaagatcccaagcttcctggccgcgtcccgctcgatccggtcgatgatctcgtgagaatcttctatatctgtgtcgttgggcacttccgcgtggatggacgccatattccttcccggtccgtaattatgtacgatcagatcatggcttccgactatgccgtcatatttctctacaaaccgtgatatcctcacatattcttccgccggcaccggctcgccgatcagcggctccagcgtatccctggcgatcccgattccggcccacatgacgacaagcgatacaccgagccctacaaagccgtcgatattgatcccggtcactttccagaacagaagagacgcgatcgtcgcggaggtcgttatcacatccccgagcgcgtctgtcgccgtggcaagcattaccttggagttgatgcgctgtccgagcttccggttgaacacacccatccagagctttaccccgacggacagtacgaggataatgaccgatacaagcttgaatttgatcatctccggctcacgtatcttgccgaccgagtccttgaaaaaagtaaatcctacctgcaggacgagaaaagctacgacaagcgcggcgatatactctattctgccgtgtccgaacgggtggtcctcatccgccggcttgccggccattctgacaccgacgagaccgatgacggaagaaccggcgtctgaaaggttgttgaaagcgtccgccgtgacggatatgctgtggagcataaagcctgtcacagcctttaccacaaacagcagcacattacaaaagatgcccaccgcactcgccagcactccataggctgtacggacagacaccttctccacatcttcatgatttttcacaaatcgtctaactaaaaactcagtcatgaaactgcctccatgtttctactggtctttcccggcatctcctccaaagaaaaaccattttatcttaaagtccgaagtggctgtcaccatttcgtattcatcgtccgtgagcacttctttcagctcttcttttccctcgtcactcacgaccgcgcacgttgtgctcataaagcacaggttcggatagagcacgcaccaccagttatgcccttcggctttccctatctcgatgcgcagcgcctcatagtcgccctccggaaatgtgatatccccgtaagtcttgtccggaaaatggcatacctgaacgttcgccttcaccccgtaagaatatccttcctcacggatgatctcccctgctttttcttctatgtcaccgagatgtctctgcgcccactgctttgtgtcctctgcagttggctcgccggtcgtctcatctttcatatcagacttcatatacgcaagcaccgcgtccctgaccttcagcttcagcgcctggtcctcttcactgtcactgttggcaagcacgtgaaaacggaatacttccccggccagcttctcctgtgtcctgcgcactttcgcatcgaccaccttcatccgccggttaacgatgcttcccgtcaggatcagcgctatacagacaccaagtataacacagatgagctgtttctttctatatctcttctcaatttcttcccgcatgatatgtacctccttattaacgatcccctcggatgttataagaagtctgtacacattttccggctcttatacagcgcctgtatgaattttatgatttttttgtgcggagtgtgtcaacgaccccctccacctggttgtctatatgtctgctcacaacttccgtagccttttctttttcttttccctcgacatgccggataatcgcttcatgctcggatatgagatgcggatatacttcatcgcttttcagatactccatccggtagcggtacatctgctcccgcagattgttcagaagctggatcagcttctggttgtccgtcgccatatagatgacatcatgaaactttacgtccgcctccgcgatctccgtaagtcccccgttcctgatcgctgtcttgaaatcctccgccgccttttcaagctcccggatctcctccttcgtgatcttgtcgcagcagagctgtaccgcaagctcttccagcgcctttctcacttccagcacatcccgcaggctcttctccgtgatctccgctacttccgcgccttttctcgggatcatgagcaccagcccttccagctccagcttgcggatcgcctcgcgtatcggtgtacggctcaccccgagtttattggcgagctggatctccataagccgctcaccgggctttaactccccgtgcaggatcgcctggcgcagtgtattgaacactacatcccgcagcgggaggtattcgttcatattgacttgaaagttaggttccatgcttatttcctccttgcattatgtacgtttgtcacatacacctgctttgttgctcctgtttcttttatctttctgccggcctctctcgctctgctcttctcctcaaatataccgaacacggtcgggccgcttccgctcataatggcattcagcgccccctgttccttcatcgtattctttatctgttcgatcaccgggtattcccggaccgtcacttcctccagcacatttccaaggcttccggctatccgggccaggtcttgtccattaaggcccgctattatgccgtcgatatccggatgctttgttatctcatgggaatcaagctcatcgtacacaaatttggtcgatacactgatgggcggcttcgctatcagtatatggcacttcggcataggagccagaggtgtgaggacctcccctatgccttctgccagtaccgttccgcgcatgatacagtaagggacgtccgcgcccagcgccacgccgcgctccatcagttcctcctccgacagcttcagggagaacatacggttcattccatagagcactgccgccgcattggaacttccgcctgccatccccgccgccaccggtatatgctttttgagcgtgatcttgattccctctttgatcttaaattcatccatcagcagctttgcagccttgtacgcaagattattttcattgacgggaagaaaatacagattcgtctcaacctcgattcccggtttctttttcttctccatgatcacctggtcgtacagatacactgtctgcatgaccatgcgcacatcgtggtagccgctgctccttcttccgagcacatccaggcccagattcacctttgccagtgccttcaactccaatttatccatatgttatctcctcgtatctttacgcctttgttccccaacgttgtatcttgtatacagtgtacttatagtatactcatgttctccttaaaaatcaatatcttatcccctggttttacctgttccgactccagtccgttcacttccatgattccttccaccgtagtgctgtagcgtttggcgagatcccagagcaggtccccgtcccggacgatatatccgacaatacccggacgccgctccatctcttccatgtctaccggttcaaagtccacttcctcgatattggaaatgcgcaccggctgctttaagaagctgttgaacgccagcactgccttgacctctatctcgtcgcttccaagcaggccgatggagagctgttccaccgcataggtcagatcgtatgtcatatcactgctcgtttcattactctccagcagataggaaaacgggaccatcccctgccacgtatcaaacggaatgacgtcgtccgcctttacatagagaaaactgatgtggagcacgccctctatctgaataccgccgtccacgatctccgtccgttccagctgtatctttccgctgctgtggcacacctgcagcatactgtcctttatctccggaagagacagctgctcgatcactttacattttgagtggttctgcatgagcagtttttcaaaggtctcttctgtgatcctcggaatacatttctgttccagagaatatacatcctccagcacatcctcgttttcttcttcatatacgataagccgcatctcaagcgttgcctccacgccgagcagccgcatctctccgtcctcatccatgcggatatcgatattgacgtccgcaagttccggatagatctgatgatacatattatcttgtgctccgtaacattctatacgtccttcgtaaggaatcacctgttcgatccagtccgtcttgccttccagcgattcataaaagcagaacagcatcagctctccctggatgagcatctcgtccgcgccaagcctcgtatcgagcttgcggctcgtcacgtctgtccacagcagtgtgcctacattctctttcgtcccgctgatggccacttcttctttgatgcggtatgtatctttcttcgaggtgagcatgcgcagcatctgtctccccgtataccgcttataaagcggtgaatcgctcaagatatccgtcgttacttccaggtcgtccataccctctgaagatacctgaagctccacgagcgctttcaggttcagctttctcgagtgaatcgtcgtcaccgtaaggtctatattggaagatttgataaacggtgcgccctccggctcctgctcggtgtatatcatctcttcaaaaggaatccgcccttccagagccgacagtctcgattccccctcctctgtcacatacaatactttgaagttcatcttaccggtgacgcggatataattttccacgaccttcatatcttctacgtcaagtgttccttccccgaggataatacgcatcacgtcgctttttacgtccggtacattgtagtcgtcgtcaatgtaaaactgatcggcaatgactttacccatccggtacgtctgtacctgttttttcatatattccatttttcttacctccttaatcaaattctacatttttgtcgctgtattccatttttataactacatacgggtacgtaggtttgttcagcacctcttctgttttgtccggcccgagaaggctgctcttcatacagaccgcattggaagtctcataacactccggcacctccacactgtacccgcttgtatcttttgtcccatatccacgggcaatgtacagatatccattatccccgtatgtgagcctgaacggttctgtcctggcctcttctatctgtgcggccagctcttcggggatatcctccggatcgaccaccgtaaaatcaatatccctgatcttgtctttgtccgtctttgtgacagaacatgaagtaagcagaagcgtgcaggccagaagaagcacgcaggagcataatcttttcatcagattcctcaaagctacattctctttaacatcatacacagcaaagctatgaaaaattccaattttgtagtataatagacgcgtatttgtcataaaactacttaatctctatagaaagcaggcgtatccacatgaaagaacagaaaagaatttccggcattctgctgcatcccacttctctgccgtccccgtacggcataggcgatctgggagcagaagcctatgaatttgtggacttcctggagcgtgcgggccagcatatctggcagatgctcccgctcacccataccggctacggcgactccccgtaccagagcttttccgcgtttgcgggccagccccttctcataagcccggcgcacttaaaagaactggatcttgtacaggggtacgagatattacactgcccggtgcgcgacgacgagcatatcgattacggggtgatcattccgtggaagcagcgcattttcaaaaatgcctaccggcgtttcctcacttcggcctatcaggactcccacagagagctcatcacgtcctacaccgcattctgcgcgcagaacgcgggctggctggacgactatgcgctgtttatggcgtgcaaggacacacacggaggtgtgagctggcttgagtgggaggacaatttccgctgcccttccccggagtacaaggcacagcttaaagaggactttgaaaaagaatgcggcttttatcagtttctccagttcctcttttttgaagagtgggcaaagctcaaagcttatgccaaccggcatgagatacagatcatcggggatcttcctatcttcgtctccatggacagcgcggatgtgtgggcgaaccagcacttgtttcagcttgattccagagggtatcccgtcaaagtggcaggcgtgccgccggattatttctccgagaccggccagctgtggggcaatccgctctaccactggaacgcacacgaggaggatggctttgcgtggtggatctcgcgcatgcgccatcagctatccctgcttgatattgtgaggatcgaccacttccgcggttttgaggcatactggtctgtcccgtacggggaggagaatgccgtgcacggagaatgggtcaaagctccgggccgggaactgtttcgtgccgtggaggacgcgctcggcagcggccttccgatcattgcggaggatctgggcgtcatcacaccggaagtaaaagcgctgcgggatgaatttcatttccccggcatgaaggtgcttcagtttgcgtttgagggaacgcaggaaaatgactttctccctcatcagttcacgacgacccgctgtgcctgttacaccggaacacacgacaatgacacgacgcttgggtggtacgagacacttgaccccgcctgtaaagaaaaggttaagcggtatacgaactccgacggcacgaaggtcaacaaggagttcatccgtctctgtatgggcagcatcgccgcgtatgcggtcgtgccgatgcaggatgtgctctcctacggcaaagaggcgcggatgaacattcccggcaccgcctccggcaactggaactggcgttttaaaaaggggatcttaagcgcgctgctcgcaaaggaactgaaggatctggccatattatatggaagatattaaattattactaaattgagacagagaggttatactgatgataagatttatttgtgttgtgatcgtgctgatactgtatcttgttctgggcatcccggtacttggcgtggaatggatcatccgcaagttcagaaggaagagcgcggatatgagctcccttcggctcgtacagtgggtattccgtcttatgctttgcatcgccggggtggaagtcactgtcatcggggaggaaaacgtacctgacgaaccggtcctttttatcggcaaccacaggagctactttgacatactcatcacctattcccgctgccgccggctcaccggatatatcgccaagaaggagatgctgcgctacccgcttctgagagactggatgaaacggctgtactgcctgtttctcgacagaagcacgccaaaggaagggcttaagacgatactgaaggccatcgaatatgtgaaggaaggcatctccatctgcatcttccccgaaggtacgcgcaatgacggtgaagaactcagcatgctgccgttccacgacggttcttttaagatcgcggaaaagaccggctgcgccattgtgccgatgagccttaacaatacacacgctatatttgaacagcagttcccgaggatcaaaaagacacatgtcgtgctggaatacggcgcgcccatctatccgaacgagctggataaagagacgaaaaagcatctcggacagttctgccagaacatcatacaagagacgatcaataagaaccagaggcttgtctaagcctctggttgattacttttctcttttacattttatgcgtacggtgatataataagacagaatatttatttagacagggcggtttgggctgtccggagaaaaaaggagttttaacaggaaaatgagtagaagagatttgaccctgctgacagacttatatgagttgacgatgatgcagggttattatgaacagggacagaacgaaactgtgatttttgacgtgtttttccgccagaatccctgcaacaatggttattccgtatgtgccggacttgaccaggtaattgactatatcaagaatctgaatttcacatatgacgatgtggactatctcagaagcctgggaatcttcagcgaagatttcctccactatctgagcggttttcatttcagcggcgatatctacgccattccggaaggaactgtcatatttccgaaggaacctctgctgaaggtcgttgcgcctatcatggaggcccagcttgtggagacggcgatactgaacattatcaaccaccagtcacttatagcgaccaagacgtcacggatcgtatttgccgcaaacggggatggtattatggagtttggcctgcggcgcgcacagggtccggatgccggtctgtacggtgcaagagcggccatgataggaggctgcgtaggtacttccaacgtgcttgccggacagctttttgacgttccggtcatgggcacacacgcgcacagctggatcatgagctttaaagacgagtattccgcgttcagagcctatgctgagatgtatcctgacaactgtactcttctcgtggatacgtacgacacgctgaagtcaggcgtgccaaatgcgatacgcgtatttaaagagatgaaggaggagggcgtccatttcaaaaaatatggcatccgcctcgacagcggcgaccttgcctatctctccaaagaggcgcgcaagatgcttgatacggccggtttttcagacgcgaccatcaccgcttccaatgaccttgacgaatacctgctccacgatctgaagatgcagggcgcggccatcaattcctggggtgttggaacaaacctcataacgtccaaggactgcccttctttcggcggggtgtacaagcttgccgcgatccaaaatgaggacggggaattcataccaaagataaaaatttctgaaaacacagagaaaataacaaatcctggtaacaaaacgatctatagaatctatgataaaacaacaggaaaagttaaggctgatttaatctgttttgtcggggagacgtatgacacgaatgaggacctgctccttttcgacccgatcgaaacatggaagaagacaaagcttccgggcggttcttacaccatgcgtgaaatcctcgttcctgtatttaagaatggggagtgcgtgtacaaatctccttctgtaaaagaaattgccgcttactgccggcaggagaagaagacactgtgggaggagacgaagcgtctcttctatcctcaccgtgtgtacgtggatttgtcacagaaactgtatgaagtaaagaaatcactcttagatcagataagtgcgactaattaaaaaggagagtatttgtttatgaagattatcgttttagccggaggactgagtcctgagcgcgatgtatccctcatctcgggcgccggtatctgcagaaccttaagagaacggggacacaaggcatttttgctggatgtctatctcggattgccttacgattcggataagcttaatgaggtattcgaccttccggatgccggacttgagatcgccagtggaatcaagacgaccgctccggatatcgaggcggtcagagcttcccggcccgaccagtctgaatgctacctcggcccaaatgtcgttgaattgtgccggctggccgatatcacatttatgggacttcacggttctgtcggtgaaaacggaaagatgcaggccacgtttgatgtcctcggtattaagtataccgggccgaattcactcggatgcgccatgtccatgaacaaactggtggcaaagcaggtatttaagatgacgcgcgtgcctactccgcgcggaacttcgcttacagaagagacgaagaacacaccgctcgatgagctcggctactatctgccgctcgtcgtaaagccgtgttccagcggatcgagcctcggcgtatatatctgccacacagaagaagactataaggaggcggtccgccgctcctttgacgaggatcatcaggatgaagtcgtcatagagccgttcataaaaggacgggaatacgcctgcggcattctggccggaaaggctttgccgctcgtggagatcattccgagagacgaagtgttttcttatgagaacaaataccaggacggaggggcaacggagatatgtcctccggtctctctcgacgcaaagacgatgaagaagatccagcgcgccggtgaaaaggcgttcgacgcactccgcatggacgtctatgcccgggcggacttcatcgtggatgagacggacggcagattttactgtctggagatgaacggacttccgggcatgactcctacaagtcttctgccgagagccgccctgaacgccgggatggattatggtgaactgtgcgagaaaattattgaagaatcaatgaaagtaagaggataagaactatgaaaaaccttacactagaaaacattgcgaaggcctgtcacgggacctaccacggcgacgagagtaaaaaaagccgcgaggcggcaggcgttgtgatcgacagcagaaaagttgagaaggattacctgtttgtcgccattgacggagagagtgtcaatgcgcacaagtttatccctgataccattgaaaaaggcgctctctgcgttgtgtcccacgaggacctcggtgatacggattttccatatattcttgtagagtccaccggccaggcgcttctggacatcgccaaactgtatcgggattcttttgacgtgacggtagtcgggatcacaggaagcgtcggcaagacaagtacaaaggagatgatcgcctccgtcgtgtcacagaaatataaggtgcacaagacgttagggaattttaacaacgaatggggactcccgatcactatatttgagatggatgaatcccatgaggtggtgatcctggagatgggagtaaatcatttcggggaaatgcgccggctgtcgtcggtcgcaagcccggacatctgcgttatcaccaatatcggtatcgcccatctggagttcttcaagacaagagaaggcatcctccaggagaagtcccagatgatacaggatatgaaaaacggcggcagcatcatcctcaacggggacgacgacctgctctcaaagatggggcctgtcaaaggcgtgaccccggtcctgttcggcacgaacgaagactgccagtgctacgcatccggcattgtgcccatgggattaaaagggaccgcctgcacgatacatctgccggacggagaagcttttgactgtctcatccccaccccgggagcccatatggtgtccaacgctctggctggcgccgccgtcggcgctgctctcggccttaccgcagatgagatcaaggcgggcatcgaagcacatacgacgctgcccggacgaaataacatcatctctaccggcagcctcatgatactcgatgactgctacaatgccaatcccgtgtccaccaaagcggcgatcgatgtactcgacatggccatcggacgcaaagtcgcagtgctcggaaatatgggcgagcttgggaacaacgaaaaagaactccaccgggaagtcggcgaatacgctgcaaaacacggcatcgacgttgtgtgcggtatcggagatctggcgaaagagatcaccgaaagcgccgcaaagggcgcttccacagagacacactggtttgccgcgaaacaagatttcctggcagagatgcaccatatcataaaagaaggggacaacgtccttgtgaaagcgtcgcacggaatgcagttccccgaaattgtcgaacaactcaagaaattttcataggggtcagacccctgctgcacagaggggtctgacccctttcaaaattaaaggagttacacatgagttatgagattttagctttagatctggacggtactttgacaaattccaggaaggagatctcaaagccgacgcttgaggctttgatccaaatacaggagcagggcaaaaaagtagtgcttgccagcgggcgccctacacagggggtgctgccgctggcgaggcagctccatctggaccgttacggcagttacatcctctcgttcaacggcggacggatcacggactgccgcagcagagaggtgatctataacaagacactgccgatggatgccgtcgggcctctgtttgatattgtgaataagtaccgggaccggggcgtagatatcgtcggctacacttatgatgcgctgctctccggcggaagtacgaacaagtacagcgagctggagtcacgcatcaatcacatgccgctcaaagcagtggatgattttccgtcccacattacggctcctcccaacaagtttctcatcaccggcaggcctgagatcattcaggaggtaaaggccgaggcggcggaagcgttccgctcttatctatatatatatctgtcggacccgttttttctggagatcatgcctccgggcattgataaggcccattctctcctccgcctgctgacgggcatcggactgacagcggacgaaatgatatgctgcggagacggctataatgacgtaactatgatagagacagccggtctcggtgttgccatggccaatgcccagcctcttgtcctggaaaaagcagactacataacgaagtcaaacgacgaggacggcgtcctacacgtaattgaaaaattcatggcggactgaccgtccggatagaagcaaaccgggcataagatgaaaaaaaggcaggcgggaaattccgtctgccttttctttcgttccatatctgacataaatgcaggttacccgctaaaactgcatagccgaccagcaaaagtgcgggtaggctctattttgttttttgcctccttgtcctgcatatttaagttggaaagggggtgaatgttatggattacgggtatatccgagtatccagtacagaccagaacgaggacaggcagcttgtcgctctgcgcgggaagggaataccggacaaccggctgtacatggataagcagtccgggaaaaactttgaccggcccaaatacaagcggatggtgagaaggttaagacagggcgaccttctatatgtcctgagcattgaccggctggggagaaactacaaagagattcaggaacaatggcggttgctgacccaggaaaagggcgtggatatctgcgtgctggatatgccgcttttagatacaagacagggcaaagatttaatgggagcctttattgctgaccttgttttgcagatattgtcctttgtggcccagaatgaacgggaaaatatacgcaaacggcaggcggaagggattgcggcggccatggcaaggggcgtgaaattcggcaggccgccgtatcccctgccggagaatttctacgaagtccataaggcatggcgggacaaaaaaatgacactccggcaggcggcggaggcctgcaaaatgccagtcggaacgttctatacaaaagcagtcaaatttgaaaataccacttaaacgaaacgtatactgaatttgcaaaggtctacttttgcaaattgcaacgtacataaatatacatataaattatacaacaaaaagcccgatgcttcaagatgttttccatatgcttgtctctatttcctgccatgcttttttgctttgcaaaagtagacgaatgcaaaccacctttgcagaaagcaggaaacggaaatacaaggaggagacgagatgaaaagaagaaggcagaaaaaattgatattattttttctcactttcattctgatgttgtctatacttcctattacagcctttgctgtaaataggactgagttatcatcagacgggggcgaattagttgccggtgagtattatttaaacgataataccgcactaataaataatttgattattccggccaatacgaaagtgacattagatttgaataattttgccttaacaggcaatggaaacggcagcgtcataacagtagaaggcactctgattctcaacgataccagttcgtccggaggcggaaccattacaggcggtaattcagaatatggtggtggaatttatgtaggagagtccggcaaagtcgaaatgaatggcggcaagatttctgagaataccgcttcacatagcggcggaggtgtgtatttggaaatgaggaacgccggttttacgctgaacgaaggagaaatatcatataatacggctaacgtaggggcaggcgttcgcataggtcagtacaccacctttactatgaaaggcggttccatctctcataatacagcgtctattcgtggcggaggaatgtatgtcgacattagctctacactgagcatgtccagcggtgaaatttccgacaatgtggctgcctcgagtgaaggcggcggagtatacatgtctaatgcagattttacaatgtcgggcacagctcgtgtttacaacaatatggccgagagccatggaggcggcatctatgtacctgaaagtgccgatttcagtatgaatggcggtgaaatttctgggaataaatcaaccgcaggcctaggcggaggtatctatattagcttaaattcaaatacagacgctgttgtattaaatggcgcaaaaattacgaggaatcaggcaaaagatggtggtggtgggattcacatctttctcggctgcataaagatgtccggcgaaatcatcatttctgataacagcaaaactgacggaagtgtcgataatctttacgcgagcggccttgctgataaatgtgttttcactggtgatctgacgggaaactcgaatataggctataaaacgtcagaatttcaccagcctgccagcaacagtgctgtccagataagctccacagaagatattacagcttactaccaaacagcaaagcagtatttcacctcagatgaggggcatggaatccgcgcaaacgatgacggatatcttgaattgtactacatacacagacacaattggtctgctgcatggagtatcaatgacacccaccactggcatgagtgctcgtcggcagactgcccgatcaccgagaacagtcaaaaaaatagctatgcggcgcatacatacgatcagcaaatggtctccgaaacctacaaagtacacaacgcaacctgcaccgaacctgcaacatactataaatcctgcgtctgcggcaaggccgggacagagacctttacaaccggtgacgcggcgggccatagctgctcaggcgcctatcaatccaacgctgacggccattggcaggaatgcgcggtctgcaatgaaaagtccgatatggaagcccatacctatggcagctggacggtgacaaaggcagcgacagcgtccacagccggcagccgtgaaaaaacctgtaccgtctgcggctacagagtatcagaaatcattgcggcagccgggacgaataacaccaacagcccggagaccggggacagcagcagcctcacgctttggaccgcccttctcctgctggcctccggcggtctgaccgcaatccggagtgcctctgtcagaggccgataagcagcgtagcggatattatttcaattatattggatcaatagcggagtggagggcatatccgaagatatgccctccacttcaactcaattatacatccttatcacgctgggccgtttatttcagctcttccagacattcgttcaggcgcttatactctgcttccacctcgggaaacagggtgtccagtttgtcgtattcgcctcctctcatggcacttacgatcttcgcacacttttcactcagcttattcatcccaaggttggccgagagtcccttcagtgtatgggcacacttctctatttcctcatgatccttctcttctatcgccttcactaaattcgggtaagtggcttcatcaccgaatctgagcagatacttcttaagcatcgcctcgttctggcagaaccgccgtatcgtctcctgcgggtctatctccatctttataagtacatctataaactccataacgatctccttttatgtatactcctgattatagtgttaagtatatcacgaatcagttaaaaaatatactccttaatcaattattcaaataatattcctcgtacaggggtcttatgctgtcagtgatcctgccgatgaccgctatcctctcgtctgcgtcgtaccgtctgttaccatggaacgcgtgatacgccccctgaatacagtagctgagcacgatatccagcatcatatcgccgcggtgctgcggatatttctcaaacaacattttcttgacgctctcttcaatgcggtcagaaagatggctgctctggtcccccgagaacaccgtatttgtgagcgaactctgggactggtaggcaaggaaaagctcctgcgtaaaaacagccggattctcgataatatattccgggtgggagatgctgtttgtcaccgactccgctatctctgcctccatcgtatctgaaaggtcgtaaatatctctgtaatgagcgtaaaaggtagatttgttaatacaggcgcccgcacagagctctttcacggttattctctccagtggttttctggagcgcagttcaataaatgcgtttttgatccctttttccgtcttttccatccgcagatccaaagctttcctctccttttatacaactcttttttccatccgtcgtttaagcaactgttctcctttagcggcggtggataccatttctctttatctgtataattattataaacaaaataaacaactgctgtctattagttaaagcaaaaaatattataaacaggagaaagcaaaatggattattacggcttctatacaggaaaagtgtttgacgcatacaattatctcggcgcccacccggaaaacgggggcgtcaccttccgcacgttcgctcccgccgcccgtaaaataagcgtcatcggcgaattcaatagctggaatgaacatgatatggaccggatatatgacggcaacttctgggaatgtcatatacaaagcgcgggtccgggcatgatgtacaaataccgcgtctaccgccaggacggcacttttatcgaccactgtgacccttacggattcggaatggaactgcgacctgccagcgcctccatcgtccgcagtctcggagaacaccgtttccgcgactgtcgttggatgtcaaaacgtacagactgtaaagcaaaaccgcttaatatatatgagatacatttcggctcctggaaaaagccttccgatgtggaagacgactggtatacttacaccgaaatggcagaacttctcattccgtatctcaaagaatatcattacaattatgtggagatcatgccgctgagcgagcatccgtgcgacgagtcatggggctaccagaacaccggcttcttcagtcccaccgcgcgctacggcacggcgaggcagctgatggaattcatcgatctctgccaccagaacggcatcggcgtcatcctggacttcgtcccggtacactttgcggtggacggctacgccctcgcccaatacgacggaacgagcctgtatgaatatccccatgtcgacgtcggcaggagcgagtggggcagcttaaacttcatgcactcccgcggggaagtgagaagctttctccagtccgccgcaaactactggctcacggaatatcacgcggacggcatacggatggacgcgatcagcaacatcatctactggcagggcgatccggccagaggggtaaataagactgccgtggaattcatccgggagatgaaccggggactgaaaggtatgcatccgtctgcaattctttcagcagaagactccacctcctatccgggggtgacaaaaagcgcagacgaaggcggcctcggctttgactataaatgggatatggggtggatgaacgatacgcttgaatatttcatgacggcgccggaatacagaagccgggactatcacaagcttaccttttccatgcattactattacagcgattcctacctgctgccgctgtcccacgacgaagtcgtccacggcaaggctgccatcctccagaagatgagcggagactatgaggacaaattcccccaggcaagggcattttatatgtatatgtacgcacatccgggcaagaagctcagctttatgggtaatgaattcggacagctgcgggaatgggatgaaaaacgtgaacaagactggaatatactgtcatatccgatccacgatgcattccaccggtttatgaaagacttaagcgagatctacctgtcccatccggcattctctgccatggaccacgaccagagaggctttgcctggatcgactgcgcacaggaggagcgctgcatctatgcctttgagcggaccgacggaaacgaacgggtcgcagctgtctttaatttttccggcaggccgcagaagcactatcttcttcccgcggataacagcgcccggtacagactcctgctttgcagcgacgcacagatctacggaggcaatacttcctgcgccagcggcagtctccatcctgaaaatggctttatcccgctggatctgtcccctttctgcgcggtctattatctgatcgtctagctgagccggggcagtatttcactcaggtccgcaacagcgcggttgagccgctgaagttcttcctctgtcagctgctcttccagcgctgtaataaatgccctgttcttcagataatattcgtccagataggatgccgcggtcggagtcagccgaatccataccgccctcctgtcttcctccctgcatacacgttctacaaattgatgctcgctcagcttgtcgatcaattttgtcacctgctgcttcggcaccttaaggtgccgcgccagctcgctcatcgtgacgcagccgcataacttaagcgtctccagacagtaatatgtctccaggctcatctctttgttcagcgtatctttaaacggcctcacaagcttggcatgccagttcggcataacgagaagcaggttctggacaaatttttccgacgtcttttctgattccatctcttttctccttattgacaaatgaatttgaaaatgctaatctttattcttgtatattagtaaataatatatgactatcatatattgtttatattttatataattatacggtacacagacatttatttcaacctaaaaggagatgcagtatatcaatgaacataaaaaattgggatatgccgaaaataacgaaggacaaagtccgtttcagtacgctgaactttctcttcattatcgcctatgtaaacattttccagcttgtattcggtccggagaattccatcaccggcgtcatatttactatcatgatgtccgcttctatggtaagggatatgaccgcttccccggtaaagcatctgtttgtccaggcagccgtactcgtctggatggcgcttgccgcctactgggtcaataccctctctgcaccttggtcctttacagttaattttatcacaattcttatcattttgtacgcatttacctatgaatattcaagccatatgtattttccctacatcttgtcctatctgtttctcgtatacatctctccggcggatgcagggcagcttccgcgcaggctgctcagtatgctcacaggggcagtctccatcctcttataccagtggtttatgggacggaaccgggcggcggagactgcaagagacgtgctcgtgcaaatgatagatgacatactccttctgatcgcctgtaagaaccgggaatcgtcagagcccccttcccccgccgatgtgcaccgcagcctcagccggctgagccagatggtgtacgagcgccgcagaaaagtcctctgtgtctccgacgctgccttctccatgatagccgcaggcagggggcttgagcatctccaccttcttgtcagtgaacttccggatcatctttcgctccagaaccgcagcctccttctccataccgagaacgtcctggaaagcttccgtgcctttctctgtcaggaggccggccatctgccgccccgggagcagtgcagcctcccctccggcagcggcggagcgtccgagccgttctccagggcgcttctctatatacgcggccggatgcttcacatgacagacccggagcgcagaacccattaccgcaggaccgtcctttctctgaaagtacgccttcaggcggcgctcggcttaagtccggtccgggccgtatacgccctgaggaccgctcttcttctgtccttcgccgcgctgctcgtgcagttctgggctctccctcacggacgctggcttatgttcaccctggcctccgtctcactgccgtatgcggatgacgtccctgtcaaaatgaagaaacggctcaccgccacgctctcaggagggcttatatccgtagtcatttattccctcataccttccgccgcaggccgcacggccgccatgatgctctccggttatatatctttttacttcaccgactatgcacagaccttcgcctgctccactgtcggagcgcttggcggcgccgtgttcatgaccgccttcggccttccggctgtggggcatatgtttctcatcagacttggctatatcctggccggaattgccgcggcatttgcagttaactgtctgcttcttccgtataccaggaaaatggccacaagacatctttggaaaaaatacagaaccgtcacagaactgctggcagacatatgccgtacagacgaaacagatccccagctatactatcatctcgtcatacagtcttatatgatggaggagaagctggcccagaacgccgagctggaggaatggtcgggattccccgggctgttaagggaatgccgggaaaaagtatatcaggctcaccgcacacttgccgcaaagcagaacgatgccccggcttttgaaccggggcatctgtcctgatatgtatatgctattttttaccctctcttaacagctttaacgataagcatcatcggacgccgcatctcgtctgccattcccggaatatgcagcatgtcctccggcggctgcggctcgatgatattaagaagctcaaatccattttccagaagtgtattcagatacgtggtcagcgtcctgtgatattttgtgaccggctcaccgagaaatactgcgtcccgttttccctcaaaatagtaattatccacagggaaatgcagtatctccccctgttcatcatagtaccagtcctgagtgccgtgcgcggtaaataccggatgttccgccgagaacacgaaaaggcccccgggagacaagacccggcttatctttttcacgaccggctgaaactccttcacataatgaaacgccagcgagctgaggactacgtcaaaggaatgatccggaagctccagatcctccatggcgcagcgcctgtattcgaccctcccatgactgttcttctcccgggcggtttccagcatctttgcggaaatatccgtgccgagtacgtattctgctccgttttgcgccgcatacagacagtgccatccgtatccgcatccgagatcaagcacacgctttccccgaaaatccggcagcaccttctgcagttcagaccattctcccgctccttttaatccttgtttagaacggctcatctcactgtattttttaaaaaaactctcactgtcatacttattctctttcatactgctccccctgccccggcagttctgcggtcctgtcttttccccgctgctttgcggcgtagagagcctcgtccgccttctcaaatatctgccggtatgtcatactttcctttcccttttcagcaataccgacggagtaactacatggattctccttaagcagcccgccggaaagctgctgatattccgcgcgcatctgtctgagacgctcttttcgttcctcctgcgtgccggggcagacttcgcagacggcaaactcatcaccgccgagccggcccacaacagcgtcttcaggaaaatactttctgatcagctttgcaagacacttaaggagagcgtcccccgcgctatgtccgtacgtatcatttacagacttaaagtcgtccagatctatgatataaaaacaaagctgatttcctttcatcagccgttcctctgtcttgcgctgaaatgaatcatgattatatataccagtcatcagatccatctccgaccgcttccggaacagttctacaagctcaaacgcctcccttacttttgccgacagcgccttcggataatattccccgtccgcctggtcaaagtaaggcatcgagtgatggatatgcaccatcttccactctccgctgtcatcgagggcatatacgatggaaaatctcgtgtccatctcaatgagcgcttccgcctcggcgtctctgcattccctcacccagatccccccgtacacgatcccgacatcgtcacgtatcatcaccgcattgtaccattcatccagcacttcaaaagatatctgtccggcctccgtctgatttccggcaaaatcctttaccgcctcttcggctgtattgaatatctcatgtctgcccgtaccgatcatactcagcttgtcatcccatgtctgcatgatcttcccgaaattttcctctgtcggctccagcatgtaatagtgccacagctttctcgttatctcacatagacgcttctccgtctccatccgcacaacctcccataagtattacataccagttactgaacatccggctgcgccggacggtctcttctgactaccttgcagagtacctgatacagatattccacatccaccggctttgtgacaaatccgtccatgcccgcctccgcagccatgtccacatcttccttgaaagtattggcggtcatcgcgacaacaggtatgactgcggcatcctcccgcttcatcctgcgtatcacgcggcacgcctccagcccgtccatgaccggcatctgaatgtccataagtatggcatgaaactcttccggcgcgctgtcttcaaacatttttaccgcgtctcttccgtttcgcgcacgccgcaccgaggctccctgcatctccagcagttcttcggcgatctccgcattcaagtcattgtcctccgccagaaggatacacatgtctctcagatagcgctttggcatatccacagccgggctttcgtcatgtacttcctctgtcgcggcggtcggaaatgctgcggtaaagtaaaattcgcttccttttccgatctcgcttttcagttccagcttccctcccataagttccacgatatttttgcttatggcaagcccaagaccagtgccctggctcttggaataattcgtcccaacctgttcaaacgactcaaagatacgctcctggtccttctcggatataccaatgccgttatccgccacacggaagcagaataccgcttcttctgcagacgcttccgtctctgtcacgtacacccggatacgtcccccggcagaggtaaacttgaacgcgttagatataagattcatcaatacctgcttcagacggaccgcatccccgataagtctgtcattttttatctgcagatccagcttgaattccagctccctgcgtcccgcctccgccgtcatcatactctccagttcattcatgacctgtcctatggaaaatggttcgcgcacgatcgtcatcatgtcctgctcaattctgctcatatccagtatgtcgcttataagaccaagcagataacgtgaagacgagcggatcttggacagattcactctcactgtctccggcacatcgtccatcatacatgtgagatcactcagtccgacgatggcattcatgggcgtgcggatctcatggctcatcctggacaggaactctcccttggcacggttttccttctccgcttttgcaagactgttctgcatcctcaccgcatgtatccggtagcgcgccatcacaagaatcaatatcactatcaataagaacacaacgccgcagatcacaacaaacataagcggattggcatatatcatctcaatgatcgtcatctcgcccgtgcctgatgatatcatattctgattggcgatcgtatccttctgggtgctgctcagactgtttatcgccttgttcattatcgttaagagctgtcccggggcaggtcttttcatggcgaagctgatatcatttctgtcatttatgagtgtgtttggaacaacatttgtaaaatgatggttctgtatctcctgctccatgatggccgaaacgccataaaaaaaatccgcctcgccctgctccacggcgcggagtgcttctgctgtattggaataatatttcacttctgaggcttctatctccgccggcagttcacgtccctccagcacagctcccgtcagcccctcggacgggtagctcacagacttgttcctctctatgatgtcattcagaacaacatatggctttgtgagcgccatctccttctgcgccgcctcctcatccgtcccgaggaaggcgccgaaaagatctgcctccccattctcaaccattttgagcccctcagcataactgtccacatatttataggaaaatgtcagaccggaaaattcctttatctcctcaagtatatccggaatgatcccgtcgtgaagatcctttttcagttcccggcagtacagaggatgccactccttcagcactgctaccgataccgtcttcttctcctctacatactttttctcttcgtcatttaatgtgatattggcggtgctgctgtcctggatatttgcatcataccgctcctgggcaaaatgcggattagaatccacgatcttcccaagcgccatgttgaggccgtccagtatctccttatcctccggtgtcgtcacgatatagtgcggctgcgaatcaaactccgccaccacgcggaatacatctgcatcgcttcccagattgccgaggatcatatccacctcgccgttttccagataagaatacatattaccgtccgttaactgttctgcgctgtatgtcttaagcgtacagtcgattccgttgctgtccagaaataccttgagccggcgtatattttccacggcccgttcatataccccgatggtctttcccgacagactcttccagtcgtaagctttgatactgtcgtcctcacggctggccagaagcacagacttactgtagcccgtattgtagtccggataggcaaaatactcttcaagaccttcctgataataggttccccccatcaagtcgtacctgccctccaggaactcgtccaccattgtttcaccgtctgtatctatatactcgtattcccatccggtgtatttggctatctcattcaggtaatctaccacgatcccccgtctgttgccatttttgtcggtctcggtaaatcccggcacctgggcaaacgccactttcaggactctcccgctctgcggctcctttgcgcgcgctccggcacagggcgcgagaactgccgtaagcgctgcagcaaggagaagcagcaccactccacatttttttatccccagtcttgatctgttcttcatacaaaactcctttttgaaatcacctgtaactatcttaccatgacgcgggctgtttttccacataaattgaccggtctctgccgcctcacacattatagcggaacattacatatgataaagtacaacttaaaaaaagcaggtgatttatatggcacaggtttccagccaggcagagcttcggacagctcttgaagctctggattcattcatacaggtaacggctgatttctctatctccgcccagatcaatatacagtacgccgttaccatcgaaagttatgccggcggcagtccggcggtactgacaaaagataattcctattcttcctatatgtttcgtataacagacggcggctcgctgactgtgagaaatatcatactcgacgggaacggcgcggctcatccgcaggcagatgaagctaaccggtcccttatctatgttaccggaggtactctcaagctgctgagcggttccatcctacggaataataactcctacctggagggcgggggcgtctatgtaaacagtaattcctcttactacaacgccttcctcatgacagatgatgcccgtataaccggctgcgcctcccgcacaaaaggcggcggcatcatgatagcttccggaaatcagggcgactcctattccatcgcaggagctgcctttatcagcggcaatacagcatctgacggcggcggcgtctacgtccgctcatacgcgcagggaacaggcggcacgctcacgatcgcagagcaggtacagatcacagataatacggcctccggcacaggcggtggacttaacttttcaggataccgcaacggaggcagcgccgccgccacgctcaccctcacgggaagcgcggcagtctctctgaacaaagcggtcaacggtgcgggtgtctacttctattctgccaacgacggtgaccgtttcaccctgtctggtaatgccgcagtcacacaaaatacagcttctcaaaacggcggaggatgctatatgactgcacagggcgcaggcgcacagtttatcatgacttccgcctcgctcaccgacaatacggccggcacgggcggcggactctacctgctcacagattccggcggctctgtaagcgtcacccaggggctcatctccggaaaccacgcggcaggaggggcatccggtaccgggggaggcatgtggatcagaaaccagtcaccagacgcaggtctgctcacatccttcaccaacatcactatgagccggaacgaggcagaagcccacggcggcggtatggcattgtacgcaggcggcagcccgttctcatttgaggtcgcaggcggtactgtatcagaaaaccagtccgcaaaagacggcggcgggctacttctcagcaattccggaaacggctcccttaccctgcggcagacggctctgaccggcaatactgccgggggctcaggaggaggtatgtaccacgcagtcacatccggtgacagttcctcctctctcaccatgacagaggcttctatagaaaacaacacagccggcgcagaagggggcggactccgtctcacttccggaagcggaatactctctgccgtactgaccgactgtactgtcagctccaacacgtcacgcggcaacagcggcggcggcatatggaacggcggttccaatgcttcccttacgctggatgggtctacgtccgtcacggacaactcgacagaggaaggcaacggcggaggcatctatttcaacagcgaagaaggttctatgctccttaccggcagcgtaaagatcacgaacaaccacgccgatgccgctcaaagtgattttggcagccacggcggcggcatctgtctcgttcccggcaggcttacgatacaggacagtaccgagatcgccctcaacagcgcacgtctctacggcggcgccgtcagcgcggctgaagactcacaggtcacggtggaaggcggcacgatccacgacaacacatcctccgaatacggcggcggtatatggatacacgggggcagcgcggtcactttaagcggcggcagcctgaataacaacaaggctttgtacggaggcggcgtctacaatgactcctatctgtacgcagaaggcctccgcaacatttcagacggcgtatatatcgaaaacaggacggctgtcgtcaggcttaatgccccactggctgccgactccgtcatacagcttgaaaactccggctatctctctccaaatacagacggcacgccgatcgtcgtcggagaagcgacagatggttatcccctcctttcacagacggatgcaaaagctttccaaaagccggtccggggatttgacggctgggagatcagacggagcagcgaccgcacccagatattactcgcgccgtccgactaccgaatccaatacgaaaatcttctgggagccgccaatccaaacccgggttcctacaactcaacctcaccggatatccaccttctgcctccgggcagtcttccgggcagccgcttcacaggatggtatgacgcaccggacggcgggaacagcgttacggtcatcccccacggaagcaccggcgacagaattctgtatgccagatgggaggccgcgggtgaagaccacacggtcacattcaaaggcggcggcagctgctgttccagagcatgcggtattccggctccgctgaccgtccgtgccggccagagtacgctgcttccggatgccgtgccgacaaggagaggatactgcttctgcttctggaatacaagtccgtccggacagggcgagtcttatctgcccggggaacttcttctcccgctcagtaccgatctgtgtctctatgccatatggaaaaaacgcaggttctgctgcccgtgcccgcctccgctgacggcctcctcctttgccgcgcggaaactggatgccgtctcaggctctccgctgtcaggcgcatggttcgccctgtcacagaacggcaaagtccttttgaacagtatctccgattctctcggcaggatcacattctcaggtctcaggcccggcagctatgaactgtccgagacaatggcgccttccggctataagcccgatactgcagtgcatcaggttaccgtaagcgaagagggaactgtgactgtggacggacagccggcagacggctttcctctgtataacaccccttccgcagaggcacatcttacgtttaccaaggcagacacctccaccgggcagccgcttgaaggggccgggtacacgctgtccaacggcatctccgccctctcggatcttgacggcaccgtagaccttggcatgctcgcccccggaacgtacaccctcaccgagacaaaggcgccggacggttatatcctcgattccactgtccacaccgtgaacgtcaccaacgacgggcatatcacagtaaacggaaatgatctgaaacaattccggccggaaaacacacgcatgcgcagtccgaagccggtcatcaataccgtcatggagggagatgccatagtaacaggcaccggcgtccccggagccgttgtcaccgtcaccttccccgacggttccgaggcatcggctgtagtggatgccggcggtcaatggtttatcattgtgccgtcctcagcttcactcctggcaaaccagaccgtgaatgccagacaaaccgtacccggcatgtacccaagcgatacggtttctgtccttgtcctgtcccgtgtctgacccgcggtccgtatatccgtaaaaaaacgccaatccggcatcaagtcagaccggcagagacagaggcataacgcctctgtctctgccggatataaactgctatttcactgatctgctgttttttctcaaaaatgcttccgcttcatcctcagacattggttttgcataataaaacccttgaatctgatcgacatggatctcctcgaccatccgcttctgttcttccgtctccacgccttccgcaaccaccttcatccctagttctttgaacgtgcgcacgatattcttgacgccgagcgccgaatttttgctgcctatcattgcgccgacgagactcttatccaacttgatcgtgccaaacggaatgttgatcaccatggcaaaattagaataacccgtgccaaaatcgtccagccccatctcaatcccaaacttcttcatttccgctgcaaagtctgtgactgcctggggcttttccgccaatgtgctttctgtaaattcgatctttacagcggacggcggcgtcccgttcttctctataatatccataaccctgccggccagccccggctgcgagaactggactgcgggaaagttaacgtggacagcgtctatcggaatatgttccgacttcagtctgttgatgaacgcgcacaccttgtcaagaacaacatatgtaatatcgatgatcataccggtctcctccgcgatcggtataaattcggagggatagaccggcccgataggagtatcgttcatccgcatgagcgattcagcatatcggaatgttccagaatgtacagaatatatgggctgatagtacatctcaaagctttcatccctcagcttttctttaaggatctgttttatctgctgccttcttctcagcttccggagcatctcttcatcacagtagcagacttgtccgcactttccggactttgcctgatttaccgcatattcgaccgcattgatcatatgctccagtgtgtcatccttcgcctgatgcctgatgataccaatgaccgcggacagattaaactgatagctctccacacaccaattctgcttcatccgcctttggacttctgtaatatacccctctatgacatcatcgctttcttccgtaaagagcaccgcgaactcatctccggtaaaacggtatacattgactccctctacgatggaacagagaaattcacagacagctttcagaaattcatccccgatgcgctggccgcacacattgttgatctgtctgaactctctgagcgacactacgacaagcgtgaactgtgtctccggatgtcggttcaacatcagactgagcatgttaagcagctcctgtctgtttggcacattggtcagataatccatggatatctgcctgttctgaaggtgaagatagataatgagcatggcgcacgttgcagccgaaccggagagtatgatgtccgggaaaatctgctgcacaatgatcacgagcactgccagtaccggaaatgtggacaaaatgcggtagatcttccgctcgatccgttttctgttcgcaagtacggttacgatgctggccgcgcagtaggcatagaaaacaatataggtcacttctatgagactgcctcttacgtaaccctgcgccatatttatatcaaatatattttttgtaaatggattcatcagtatgaataaagaatatagaatacccggaataaggccgaaacctatgatttttttcctcgccggatcctccgaatatattaccgatatactgtataagaaatatacaagccccatgagcggagtgagcataaaataaacggtcgtcacaaaccacgtcatccaaagcggtatcgtatcacagtgatatatcatgacggtggaaactatattggtaaacatggcgctgaatgtcaccagcagacatccctggaacatttggttcttcaaagtaggtgtatggcttcccttacgggaatagacccatatgatccccaatatgactaaggatattgattctggcgctatattccaactcacgacttccaccttccgtttctgcccgcatcgcgttctgttattccggcacttctattataccattcctccctgaaaaggcaatgaaaaagacgcctttttcagcgtctctccccttcattcctccgtctcaatgcttctacctgcctgagatgatcggccctgttttcctccgctgactttgtcgggtcttccccgtcatatctgcggcacggcagttcttcacactgtccgcagtgagcgtatctcttcccgttcatacagcagtcatagatactgcatatctcttccccggtgtattcaagccagaatacctttccctctatctcctcgcagcccccgcagctgtccggataatattcacaatcggaacatactgtcccacagcagcttatgtatttctccatgatcaacccttctttccctttcggttccccgtttcggtcattctcccgcattcactgcactgtgcgtcatggagtgatatgacacccccgcaggccggacatgtatactgctccttctgacatcccataaatgtctcaagtccctgctttttcgcttttcttccgttctccacaagacttgtgccatagcgcgtcgtatagcttttctccagcgcctttatccgtacgcacggataggcggaacattcaaagcagtatgaaagtccttttgagtgcacacaatccttaatcttacatttccggcaatgttccggtttgtctctgtctcccctgaggcatcctgcacatggctttttatgaaggcagtgcttgtaacagacaaaacagttcatcccacacggagcaaacataacaacatcgatctttcctggaggcatctgcatatgtctccctcctgtctgacattttgttttcttaccggtaccctgaatcttcctcacttcttccaaccattcactttgccgctctttttttcggcgcgcgtgtgccgatgagattgatcgtatcatccagtatctcaggctccgtgacatcgatcatcagccaccggcttccattgtatccgcctgtcctttcatacaaatcttttacatatggcgtgcaggccgtcagcagcagttctgcttccgcggcttctctgttaccgatgctcaccatacaggtaaaatacccttctgccgggtacagcgtgcagagcgcccttccccctttcttatactttacgttccatcccggctgcatggaacagccgctgtattcgatcttcggtgacgtcttgtactcttcctccagatgtgcgcacagttcctcccaaagtccgcttccgacatactctcctatctgcttcatatccggctctctgccggcgtcatatagctggtgccatttcatctattttcctcctgcgctgaatttaagtataaacattgtatgaaactcatgttatttcattttcccattataatacatacaatatgacaactgtatgtcatattcactttgtatctttaatccgattttatcatactccagttatagccgccaggtaaattggtggtaatatattccaattgtatcccataatcatttaacgtcaaaaaaatatcagacaagtgcacttttaatattgtttattaagttaatttgttataaactaaaatgacagtatttttacatttatcgatcatgcatatttctggtgccagaatgtgctgaaaggagtctgtatggaatcgcgcagcagcagtatcatgtcccggtttcgcaattcaatatccgcgcagtccatccgcaatgggcttacaatggccataccatttctcatcatgggctccttttcactccttttgagaaacttcccaagtgatgcgtaccaggcatttctcgttcattttctgggcggggcggcagctgagcttcttgagacgctctacacggtcagtctcggctcgctggcgcttgtactgagtattaccatcagcctgtcctacggactgctggcaaagacagatacatttatcttatatcccgtcgtggctgtctgttcctatctggctttctgcggaggcatggaagggcatgacgagtatgtatttaaggcagaatgggtatttaccgccatgtgtatcaccctgctctcgtgcgtgctgttccggcagctgctcaagttcggcagccgcctgcgcaagctccacacaacaggcgcggaatatctgtttaacatatcgatccagagtctgttcccggccgtcattatcgtggctggttttgccgtggtcggttatgcgctccgcaccgcctggggaagcagcaatataacaaactttggctcttacatatttttgaacatatttgaccggctgagcggcaacctggccggcattctgctctatgtcgttgtgacacatgtgctctggttttttggcatacatggcaccaacacgctggaagctgtatcccagaagctgtttgaacataatatctcggtcaaccagtccctgcttctggccggcagcgcgccgacggaattattttccaaaacttttctggacacatttgtattcctgggcggatgcgggtgtgccctgagcttcatcatagctctttgtatcatctcaaggaaaagccacaaccgcaaaatcgcttatgtagccctgccttccgccctgtttaatataagcgagatcgccgtgttcggctttcccatcatctttaactttaccatgatgatcccgttcatactgacgcctgtcgtgctgaccttaacaagtacgctggcggcgcaggcagggcttgtgcccgttgtgacccagtccgtagaatggaccgttccgatcctccttagcggatacaaggcgaccggctccgtggcaggaagcatccttcagcttgtcaaccttttgatcggagttcttatctatataccgtttatcaagcggagcgaacagaaggagacgctggcattccagaaggttgtccgccgcatggaacaggacatggcggccggagaaggaagcggcactctgccccatttcctccatcacaggtatccgtattacccctacgccaagacgcttgccatggacctgagcaacgccatgcaccgcggccagctggaactgttttaccagcctcagctctcctccggcgggaacctgcacgggatggaagcgctgctcagatggaaacatccggtggccggctacatcgccccgccggtgctcatagcgctggcctacgaaggaggttttctccatgagctgagccgttatcttctgaacctggcgtgccgcgacgctgtgtcgctggagccgcatataaaaaacgacctgtacctgtccatcaacatttcttccaagcagatggaggaaaacggtttcttcgacaaatcgctcgacatcatacagagttataaactggaacatgttcaccttgtgctggaaataacggaacgttccgcaatgatcatatctgacacactgatgcgtgatatgagccgcctgaaagacagcgggatcagcttcagtctggatgactttggcatgggacataattctatcctgtatctgcaggagcggatctttgacgaggtaaagctggacggaaagcttgtatcccagctcccgggcaacgagcgttccaaagacatactgtccggcatcatctcgatggcacaaagtctggacctgcgcatcgtggcagaattcgtagagacagaagaacaaagggatatgcttctggaactcggctgcactatctaccagggctactattacagccgcccgctctgctatacagatctgactgcgttcctgaacagcctgccttaaatatgagaagggcagcttttatcgagtccgtcccggtcccgctgtcagctcaaagtcctgccgctcccgtttggccccgttgacaataagcgttatcgtatgtacgccaggatagtgcttccttgtcgtcatctccgcgaaagaatgcttttttgtgcagctcttcttttcattccggcccagcgttatttcagaaatctgaaataccttactgcttctttttccgttggctttcatataatcaacagcatattccagccttacctttgccgcctcctctgttgatatggaaaacgaaaaagtgatgtcctctcccatgggaactgctgccggctccagcgtgaagccttctatttttatggacgcggaatcatgatatccgaacagagcgaggatctctctgttcccctttttgagcagtgttctgcatccatgctttacgatccagtctgtgtattcatttttgccgtaccattctttggccagcctgataaccagatccgggtgtgttttggaaatatcattcagattattggcaacactcttccgcacgtacagggaaggatctgctttcagccgctccagtatgggcagtacaggcgacggatcctttttatatttgaccagggcctgaccccacggcagctgaggccggcagccttcgctggacagtctgcggacatgttcattttcatgcccggaccaggcgtacatctgtgccatcatacgctcctcctggctgatgataaacggccttacggcaaattcagaagttgaatactgagtataccgctccagagcgctcattgacagatcccagttctcttcatcctgcccgaagacctcgatgaaatccggaaaaaagatgccgaaaaatcctttcgtgaagactgcggccgctttatcgagtatggcaagcgctctgctgtagtcctccggcaggtatgcggccaggcttgtgctgattttccggactctggcttttaactccagcttatcccacgtctcgtccattgttgtctgcagaaatttatcagcctgaaatggagggtaggcggattgtatggtatgcgccagtttttggagggaattgtaattgtacacgttttttaataagtctggcatgatgggcttctcctgtcgggtggttttattgtttaggatgtttttatcactctttagatttcagtattcctttataaaaatttatattctatttcttattttactgtaagttttcaaaaaatcaatctttatattccttatgagacagagaaagaaacccttttgcagagacagcagcggcgcagaaaaccgccaccatggtgccgccattgcggcggtatacatagatttgaaaattcatttatggtttgttttggagttccgtattttcccgcatcgttcttctcgttttactgccgcagtcagagttaaagtaagtctgactgcccttccgtcagacagatcctccctgtcttatatgtcctgcctcatcctgtctttcatatcttttttattctggtacatcgcatcatctgcccgcttaaacacattggaaaatacgaggtctatatcactgttatatatggcaatccctcttgcaatggaaagacggctgtcggaatcgttatgcatattatactcatccaccgccgtctggaatctctccagcaattccacataatttttatagtccgtgccctctaagattaccgcaaattcatctccgcccacccggtagacgggactgtgtggaaaacttttacagatcagcttgcaggaatccatgatcagcatgtctccaaaatcatgtccaaaacagtcgttgacgtacttaaggtcgttaatgtccagcaccacaatggcaaattccgggcacccctgtctcatcagttcctccagacgtctttctgcttcctggtaagccgccttgttctttacgcctgtcaacgcgtcgcggtaagccaggctgttgatataattgatatatttctgcagatggtctactgtctgctggaaactgtctgagagcgtccccacctcatccttcgtctgctgtgtcagggagatgctcaagtctccctcggcaatcttttttgccgccgtattcagttctctgagcggttttattatccgtctcgtaattgccaccgtcacaaggaccgaaagcggcgcaatgatcaataaagcaatagcgatctgcagaatgagctcgtttttgcttttgtcaatctcagacagaggcgcggtaagagccagccgcatcccattattaagagtgcggaacgccatctttttctccaccccttcattcgtgtaggtgtaaagactgtttccgctcgtgccgttttccagttctgcggtaagcgggatgaggctttcatccacactgctcatggggattccgaaaggataggtgttatggcacatgacatttcctttatcatccgtcaaaaatgcataaccgctgtcataaatctgaacatcattgatcgtatcttttataatattgaaatcaatatccatgcccacaacacctaccgtttcattccctctatagataggaacgacgtaagaaatcatctgcacattgatattctcattggaatagggcgcaagccagctggctttcccgttctttaacggaatataataccagcctacatgctctgtatccgtgggactgtattttgagaaatcagtgggaaccaactgctggaaagtgccgtttagatccgtcttactccagaacagacccgaagtaggcggggtaagatccggattgaaacggacgtataccgctacagccccttcggtattatttgccgcgtttaccgctacagattccaaccgttttgtgtattcctcaagataggcttcatcattcttaagacgctcgacgctttccaactgttcatccgtaaatactaccagtgtcttgaccgattgttcaatacgggagagcatggcatccatatcccccgccagttcgctgcagcgcagattcatcagctgggcagtatccttatccacagctttctctgcgttaattatgccggctcccccaatgactgcggagcatataaatatacagcttaagatcagtataatgaattttgtctgtatggatctcatcacccattccccctcccggacggcgttgtatgtatcacttcctctttcagtttgatcaactctcctactttgaactcggcccagctgtagttagacatatattcacccataaatgtacgcagccgctctctgtctccattaagcacatcataataatcacagtccacaagagcagtatttatggcgatgtcccgtctgcttctgataacaagctcctccagaccagcctcccgcagtgttttcacaagatcagacactactttctgcgtattgttctgcaccgcctggttgcaggcacggtcctcccacaaaaccgccgcaagttctccataagtaacccgggctccccggcggtcagtcaggtaggccagacattccttgcacttcgtccttctgaacttaaggggtacggaatctacaaacacctcaaagaatccaaatgtctgtatgcggattcctcgttttgaaatattctgaggcgggtgtcttaaattatcgagttctgccttaagatcctctgtgcgcaccggcttcatcagatacccgctggcatgaagacggaaggcatccgtcatatactccgcataacctgtcacaaatataatattcaaaagcggagcaatgtctttacatttatgggcaagctctattccgttatatccgcccatttcaatatccagaaacgcaatatccacctggcttgcgcgaatatattcaaagacctcctctgcctccgtaaatccggtgatctgcgactccggctccagttttctcaaaagggacagcatatattccatcgctaatctttcatcatctgccacgataatattcaactttgtcctcctttctgcggcagaataatttttactgtcgtgccgcagccctttttactttcgatgtgcatggtcccgccacactggagcatgaccctctgccggacattttcaattccaatatgggtccttccatcatcctttattttaaggggatcaaaacctgctccgtcgtccagaatggaaatgaccacatccccctccacagcttcacttctgactgtcagtgtgccgccgcccttcttcttcgtaataccccagcggaccgcattttccacaattggctgaagcgtcatggccggaagcataaaatccgtatactgaagctccaggtggatcgtaagcttttggtcaaatctcattttctccaggtagagatagtcattcacatggcgcatctcaatttcaaatggaatcagcctttgctgcgtaagtgtatcaagattcccccgcagataatatgcaaagtgctccagagcttccgacgccttctgcggatcagtgtcgcagagctgcttgatccccatcagcgaattatatagaaaatgcggctgcacctggcttatcataagtgtcatcttggactgttccagttccatctctctcagtctgcgcttttgtgcctgattagcctgcagagatacatatacaaaaataatgcaaactgtagtagccagatacagccatgctatgccataaataaatatctgaatcaccatggcaaaaacaggcaggaatacgtaggaaagtaagatccacacttcttttttcttaagttcccgtctgtaggacaaaagcaatccgatgtccacagccattccgaccagtccccacacctgtgacagccagaaccagtctccacggcagtatacgttatttcccacaaagtcataatacatatggttccactgtgaaagcaccgtcagagctgttcccacgccgcagatcccccatacaactctggcaaaccagcgtgagaccggcttttctgccgaaagatatcccgtcaggtactccgtaaaaagcgccattaatatataaccaagtatgtagaccatgaaattggccgcgcgcacgccccagtaacttatggccgccgtatgtcccttaaaaagccatgccgccgcgtcacttaccaacagaaggccattacacaaaagcatcgccgcaaacaatctgtccgtccgtgtcttgatattttcaccaatataaaggctggatataaatacaatagaaagaacagcaccccagatttccaatgagatattcacataacctatagcgctcataaacactgccctcccttctgtatttttaaattaattgctctattattatcatacacctgatttctgacaccagcgtgacaaattgactgttgcggctgttgcgctgtatattaaaagttctttcatataccatctatagttatatttggtatagatttacttcagctgcaaataatattttttaataataacaggaggtactacaatgaaagctatcgtatatgatggactgcagaaagtagaatgcagaaccgtggaagatccgaggttagaaaaagaagatgacattatagtaaaagtcacttctgctgccatctgcggttcagatctgcatttagtgcatggtttggtaaagggaatgtatgatggatatgtattaggtcatgaaacaatgggaattgtcgaagaagtcggaaagggagttaaaaatctgaccaaaggcgacagagttgttatcccttttcccgtggcatgcgggcattgcgaattctgtaataaaggagaattcagtcagtgcgataattcaaatgattatggtgaatcgggcggattattcggttatagtaaatatcatggaaattatgccggaggacaagcagaatatatcagggttccgtatgccaatgtcgggcctaaaaaagtaccggatgaattgacagatgagcaggtcttatttgtaacagacgtcctgcccacttcctattggggcacggaaatagcaggcgtaaaagccggagataccgtcgtagttttaggctgcggccctataggattgatgacgatcaaatggtgtattcaaaaaggagccggcaggatcattgcggtcgataatgtaagctaccgcctgaaacatgcaaaaggttatggggtagaagctttaaactttgaagaatatgaacaggtaggggcgcacataaaagagatcacacatggaggagctcattgcgtaattgattgtgttgggctggacgggaaaacttcagtcatggaaaaaatcgaaactgcactcaaattacagggaggatcaaaatcagctatagaaatagcttcccaatgtatcagaaaagccggtacagcagctttcgtcggagtatatggcaataaatataataactttccccttggaaacttcttttccaagaatatcactttaaaaatgggacagtgccctgcgaccggatacgttgacttgatgttacaaaaaatccaaaaaggtgaatttgacgcaacagatatcataacccataagctttccttagaagaaggcagccacgcttacagtatttttgataaaaaggaagacaactgcattaaagtaattttaaaaccataagattcttctttggatagcggctgctttaaattttcacacacccaaaatttctgcagcgcatcccagtaccgaatctccaaaagttctgaatgtcatatctgctgcgaaatagctattattaaaacagaaaaggagcggcatgagataacaacaaaaagttttcccatgccgcagcctgtcgccgatacttacccctgatacttccttcctgcagggtatatccattagaactgattaaatataccgtctaacttttttcatgtactgtctgtattcctctccaaatgcttccatgcaccatttctcttctgaaagaataatccaatgtgaagaaatttgaaatataagtacaatcccgaataacaggagcgactgtgtcagcagcgcgcaccccgcaaaacaaataaaataggacacatacatagggttgcgggagacgcgataaagtccattacaatttagtccgtcaatagaaggttttgcaaagtttacaatcgaaaccgcgcaaagtatcagccctgtaatataaaaaaacaatccggcacaaaatataacagaaagctctatccttaccgtaagaaaacatatgtaaatgaatattgccaaatttgatatttggtatatccaatatgctgttatctcgtttcctgatagcggagcaaaataagcggcacgttttactgcatctttatttaaaagtgacaacagtccgaaccgtatcaggaaaaatgggatcagcaataaaaaacctatcatgatagattcctctccgcctctgcaaatgggccttttgcgtataccaaaatatttcttgatctcctgtaatatcctgctcatacatcactcagcaaaatatattttttcaaaggcaggacattagataacgttcttgtgattataatcttctcacaggaaataacatatatccctgcccattttcctgtggacagaagaactcatggactgcacccgccagttcaaatccgttctcctgcatataagcaatccctttagaaaacacatttccttccgtacatttcacacagagatattcataaccgggaattgtccattttccccagttcgccggtgcttccacctcgtcccgtacctcgattccagcaagatacaatcctttagtaaagttgtcctcccaaggttcaaagttacgggataggtcggacatgactccccatatcccgccaatataccccttctcatccctttttgccaaatgctcgatctcatgaaaatgactgttggcattctgccaaagtctctgaataaaatctgtgccgtcatttgtggagccttcctttccaatcacagaaaaagactccttcacgcatctattgatctccaaacgttttcaacactcctttatgtaatattccacaccttgtacttttcttctcaaatacctgcacatgcactttttataacttatataatcttcaccgagggcagccggtaaatattttgcttcctacaatatcgcaaatgcagtataacatccgcgaaaaccgagataaacaataatatcccctcattacttcgcctgcctggcataatctgccgatacatttaataaaaatttggcattggctcctctggatattttccctccatattaagcacataaggccacttgcctgtatctgcaatgataaatccgtaaataactcccatatggcgatgccagtgtctgaattgtcccaatatcagacagaatctggaaatattgcaattttccggctttgaatcaagttcctcatccgtcagactgccgatatattcttttattttttcttctattttgtgaaaataatcttctaattgatctctttccaggtactcgtcctttgggattacattcagatctgctaaagttaccgtatgaaattcaggattttggtaggaagaatcatatggatttatataccatctgtccatagaatataaggtatggtaaaggtacctccacataggaatcccatcataccgcttattccaaagttcgtcggggatacatttcatcaggttttccgtctcccatagggccctgtttgttaaaaattcaatatcatcacgcagcaccgcattcgcctcccctgctgctttctacttcaagttaaattcagtttactatattacagataaacaatctaccaaaagccaatagaatgcatgcatattttaacgttgcttttaacaagtccttcacttttgcacttgagtatgggttttgtcaaaaggtaagaggtttgtcccgtgatatcatttttctaaaagccacgtgaaaaactttctctgaatatttgcccctctatgtctccagagttacttttccattccactttttgcaaaacacaactacatttttcatttaatcccgcaaacgcccgtcgaatagacctttacgcacgagaagtgcattggtttcaatacgattattactgcccaaatttatttcataacacctccaacgattgaaaatttaaatggaacaaactttagcgaattacctcatctaaaaagcttgactctatgcagatatctctctattttgatttaagtgtcgaaaaatggctattttccagcagctgctccttctattttctatcttttcttgtgtttgtaaatcacccttttaatatctcatcaatttgttcagattcaatttgctttttcaaacaatcaatttttgtttcgatataatttttatgctttatccattttaaacctatacagcttggaagcaatgcttcaagaaacttaatccaagcagaatacataggtactgcactacctgaccaactccaagaaataggggttaatggtatcctttcaaaatcttcaaaaactggatcattctcaaggaacagaaaaatatattccttttttctttcggtttctaattttgatataaccgaaaaaagacagaacatttttgtttcatcgttgtagaaccgctgaatgcattgccgaatccactcatcttgtcttcccaacaggttttgctcattttgtattggtaataataaagactccaaaaaatatggtacggatgtcttgggatattgacacttctttattatctcctcaaaaatcttattatatatttctataaaatcatccaactcaaaaaaacaacgatgcctttcttgataatccctaaaagaaacattatttttatttagtaaacaatttatatacttgtccagtatagaaggtctaaccaaatatatttctttcaggaattttccgtaataatcctggtgattatcatatgatagtatagcacaataaatttcttcaagtaactccagattacaatcgaatttggaaattacttccttcggtgtattatgatagttattaaatagcaaatcaaaataaatatgcactataaagagtgaatattccctcttagctaaaataattttacatccttttgtcaaagcttgctcatctattacgttgtacttttccagaaaatccacatcacgcattgatgaggaagtaatatctttgtcagatgtatctttcaaaaagttataaagcccacgtaaatgattttctgtgattaattctttcggcaattcatgataataggcatacagccatgcatttttctgactataatcttcatcaataataatctgatgcacttctgaatcagacaataaggtaaataaaatgtctatcaagtaatatggttgtaaattaattggcgtatctttttctatgtaatacttaattgcattaatatagcaatcttttttaagagaaatagcatcaaaagcaattcttaatccttctccaacctcccaatatatgtgaccatcaagctctgggatatcattgcaaacatcaattaaccttttaaacatatctaaattgcaatttgaaacgtattgctcaatcaattctcgttttagtttttcatgttcttcataaccaacatccgtattgtaatcttctcctttaagaagaagatatagttgaaaatattctccagcaaaatattcagcaaataatgattcacaagagatgttcatactattgaaaacattcgctattctttccactaaaagacagttttctaatttatccggcggaaaatttagcttcaaaatcgaattgatatactttaaatcaaattgtaaaactggaacacttatatcctcagtagtaccaccataagaactgaggatttttctaacatttaccctatacttttcagtcgcacataaggaggataaagattcccaaattagctttctgtatttttcaacaccttcagatatggctaatggtatttgatatataataattgtattctttcgtccttcatccgctggggaaaaatgcaattttaaaaattcttctgctatttctaaaaagagaataacaacagattcttgtttccagtcatctgaatattctattatcttctccaaaaaagttatttgtgtgcaaaaaccacagcgtatagaatctttattaataccaaaatatagattaactgcgtgataaaattccatatataaatctggccgcttaaaataatatttgaaaaataaatcacacgcagttggaaaatcaatcatatctgcaaaaccgccaagaatcttaatgatatcgtttgttatgttctggtaatttttccctttatcagtatcaatattatgccattcataaatcactctttcttcggattcgattttattttgcaaaatcagaagtgtttctgtgggattaatacgaaaaaacactttgacaaattcaaaaaaaatcggggattcttctgttaataattcatcccataatatttttatttctttctcaacaaaatcgaaaagagtttcatttctgaatatattaagtaatgtattaatagaagtgatagtgcgctctctaaaactttgaaaacaagctttaatcatttccgacagactaagtagttttttatcaaaaaaaacatattttagcaaataattagataggcattgctcagaaaaatgaacggctttatcattgcaaatatcgacaatttcctgctcatgaagcatacggatgttttcaataaactcatctcgatttaatcctttttcctgcaaaatcggcaaaaatgcatcaatgtgttctaaatggattgcttctaaaaaagcaactataccagcagttatgcatatgtgattgttcacaagcaattgattatccgctaaagaatatccgtaataatcttcatataattgtgacacatcattaatagaatccaaacgatttgaattacatgctactttccccgcaagtatagcaatacgggcatttccctctgcaagtcttatgattctttcatgatagtctcgatttagaatacccaatgaagtttcgagcaattttttaatctcatcatccgtaaatatatttatttttatagtttcatacaaagtaatttctcgaacatcatttatcactttttgaagtgcataatccctcactgtaataagtatttttacattatacccctctagtcccttcgtgacataacggataatatgctgcaatcctgacaattgatttgcatcatcaataaaaagaaaatagtttccagggctgtctataaaaagttttaagtcctcgtatattggtaaagcattactgtgaatgcagtagaccttttcactgttagcatttggatgatttttcacataatgcaaagctaatcgagtttttcccgtacctgctgaaccgtgaagtataacaacatccactttcagataagcatcgctgatatctttaaattctttttctctaaataagaattcagtatcaattggagccgccattttatttgaattataatgattaataaaatcatcacacgattgaatttgatccgtacttattgatattcctagaaaatcacgggaaagattatggtggaaaagatatatatcttctgcaagtttatcaattccaataaccataagtttgattccaaaatcttcacataaagcttttacctctctatcttgggcaggcgtaagatttgatgaagtatgacaataaataatttcagaaattttattatgcggaacgcctgtctttgatgtatcaagacatttttcaaggtcatccttaatttttgcaaataagcctgccttttgtgtcgtgtattctacaaaaacatactttccatttgatgcaataaaataagtatctggtgttcctagagtggtctttcgtgtacctgcttctccaccaagagatactatattaggatagccgattttatataaataagaatcgcaaagattttgaaatgaccctgcatccaattggagaactctttgtttgatactttcaatattagccataatcaatacctctattatttgaaatcactttgttccactaaattattttaaaatattttaatgcatactcaattgcctgttccttttcaaacggcacttgtggaactttttatttcccttcacctgaattataattaattcgttctatcagtccatattttcttttaacttgtgctatatataatcaaaccctgtcttatctaacacatactgctttatttcaacgtatgttgacctactctctgcctgtgtcaaatccacctcatccatcttcaaatcaacatcgatatatttattcgattttagttttaatatgccctttaagaatatgtctataggaagtcctaacacctttttaatgacctcttctgccattgcagaatcaaatacaatgctgatgtaatcaattttgatactcacattgtcacgtcttgcgatttcttatcctctctgatatactctgtttcagtacatcattaaaatctctacaaacgttgattcctggctatttttgaattatcgatcctgtatgtacagggcggtgttacttattcgccctgtgggaacgccttcggcgttccttcctgccctttctccgcttttcgccttcggcacagcggagaaagggcaggaacttaattagtcataatactttttatcaatacaacactttttaaatttctttccacttccacaaggacaagggtcatttcttcctactaattttttatctaccaaataacttctagcaaattctgattcagaccatgcaattaattgttttccccgcttttcatgcgtaaattgtctccataaattcaatgggattccaccgttctctaggcttgtttctccattcaaattataatcaacaaaacatataaaattttcattactttgaaatagctccttactttttcttccatcttctttataaacatttaaatatacagaatctgcttccatcgtaccatgtttgataatatcttttggattggctatattcttaatatttgatacccacaaaattgcttcatctattatatccaaaatttcaattcgttgatctatatcacctataaacacatgagcccttaatctttttttgttttccagactgcagtcttcaacttgcctaattctgtatgattcgctattgtattgtggatacttataatattttatttcttctaaatcaatttcttcttctgaaggttcaaataatatttcatccccccttttaagcatgttgtctataacttttggaaatgaatctccattataatttataactatttcaatctctgtttttaaaaaacgtatccaacttgcttttaaacgcacattatgaatgcctatccaatattgctcaaattcaggatatttttcataaatttgaatcgcaactaatagtgcagattgcctacaaaatttcctattgattacttcaaaatctaattctacatttaattgttgagggttttgagatacatatattcctctacattttattcccggtacacttaatttttgctccaacatcatataagacacatatgtattatttgcaacgggttgtattatctcaatatattcattaaaaaaaagtgaaactcctaatagtacagcacttgctacgtcataagtattattaattattgtatcaaattcatatgcttttaatgttttttcagataaatttccttcttctgtgtaatgaaatacaatctcccttccatcctctctaaataatacccctccgtgattgattgcatttctaatatttacgtctattttactttgtaataattcaaatccattttttcttaaaacatcacagattggctttaacattctttgactactgtaatctttttccactgtacaatttataattaaaacgattaccctaaaaagatttgttaaacatccctccaagagattaacgtatgtcggtattctatacaatctgtttttagtaattgtatcatcaatagtctttgctaaatcaacgataatatctgttatttgtctataggtattatatcccatataaaaatattctaatacatcttcaccgaccttaacagtattggtattattttcatataatttctgtaagcccttaaacgtagcctctttcacatcctgattccaaaactcacctggtgacgttaatataatttcagataaaatatttaaaaagtctggtcttacttcccccgtataatccaatctatttttaagcttttctataatagtatcacagccaataggttcatgttcgccatatttttgtccgcgataaatcattctatacgtttcaaatgtattcaaaaaaatccctccttttatcacactttattaaatagataataacccaaaccaactgagggcttcctctatcgcttttaccttcttttccgggcaaccgggatattccctcttcggtacatccaccctattcggtgcgtcatgtataggcaatccatgtttcctcttcacttccgcaatatactttgtatgcaaattcagaccatacttctctttcacatactccttaatcttctgatacgtggctttctctgtcacatcttccttgtcaacagtcatttctatgtcgattctttcaacatccttttaacgtgttaagagcgcaaccatctccacatgtggtgaaagctgatacttatactacatggcgtaaataattgtttacctcacaaactcttcataatcccaattttgaagttgccgtacaaattatttatccttgaaaatatgtctttatttgagtatctcagtaccagttgttactcctgaaccgtgtattttttttaattccacctggccttttacagaaatattcagaaacgtatagtacaatcgtttttaacctaaaaaacagaaataagcgcttacaaattacaatattttataatctatactgcttagcataatatgctttctatatttctacaatgtataagctttgaccaagatttgcacttgattcaattatttatacaaatcttttctcaatgcccaaacaagaatatcaaatgattcttcatttctatcatctataaagtgttttagccgatctaaaacattattatttttagttaacaattttaccttaggaattgccattttcaaatcatttatcgcattctgcacattctgttcatctgataactcttgaatattatatcttgctacccctaacgagtattttgcttctttaggaaataaaacaatttgagcaaaaacaataatagactcatacacacactttttctcgtcaaaaatatatttctttttttcctgtaatggatttagaataaacgttgacaaaaacaaggtgattattgatgaactaaatatacttataataattgatattatactttctatgctcatttgtaacctccatttttcagaaaaattcattgacctaaaacacttcaatgtttcaataatatattgccttcttcaggctgattgttactcacctaacgaatttattttggagataaactgtcattctcaaggatatcaagcccacacatctattaacctcaacctcgtatggatatgcatcctatctttatctttgctaagcccttattccccttacaagtagtcataacttttgctaaaacgttcattttccttgccccgccacggtaactgaaaacatatttcaccccaaacacccacaaaagcacacctacatatccaccgcaaatcccgaaaccctttgatttaccggtctctccgctccaacaacgccactgtttccacatgaatcggtactgctaacagaacacaattctttgacctcggtactctcatatgaacacaatctttcattattatgtatagtcgaagcgtttctacgctttcgcttaaaatccttttcgttaaaccagagtggatacctgttttatacataaacgttatttttaaaggctcttccacacctttttcattataacctctaataataatttttcgataattagtttcactgtgtttcagtcgcttcctaatttttactttcataaatatcccagtcaatatcgttgttcaatcttaaatcacgcaatttctcttctgagttaaaactgggcggcaaactggaagttggcactccttctcatcatggttatagaacatatggttctactgataacccaagcattttccatatttcatatgtatccctagccccatagatttcatttgcgattatctttagtaattcgttcgtaattttcactactctactttcaagaaaatagattaaatcatgcatatcaataaatatgttatctcctgcttttaccttcacaccagagttttcaaatcctgccctcataattaaattatatgtctcatcatccaaccagaagtaacttgtttcatacttatatttactattaccacctcttatcgctttaataaaatcacgatgcacaatacgatctcttaattccctaatggcatcaatcccggtcttcgcatattctgcttccaatacatcgtatattgccaccgacttatctattattgcatttttaaattgactcccctttaaatcaattttcatacgatatagtctcaatttatattggttatttattatccacgccaaattatcgaatgttcctgtaatcaacagtatcagataagacaaatggtatttcaaatgcattacagtcaaattattttgtcttttataagtttcaattttacattgatccaaacatagcgtcagcatacacaatctgttatctaaagcatctgcccaattatactctacttcattttctattacagcactccaataattttgaaactccgaaaacaactgcttgtgtttgtacatatagtaaaatgtttcatcaatattaagacgttcacttattataaattgttttctttgtacaagaaataatctcaataattctttgcatctttccagtgaaattactggtatatcacattcttcttgttcaaggaaaaaatctcttgtaacaacataatcaaacaaatccgatactaattggccatgtataatatctttttcagacagcttataaatatctatatcgtcaatattctctggcaaatgattatggatactaacaacacccgaacaatcaacaaagttaatcgcaacattcgtaaataccccatgcttgaaatgtgaatactccccaaccatcaatttgcaatctttttgattcgacaacacgggcataaaatagattcgtattttagggattttatttgcattgcaaaaaaacttcaaagctacactatcattcagaaatttttctgtgtatacaagtatggatatagcctctttattatcagaaaacacatttttcttttctatgatttccacttcctttcgttcataaatacataaaaatcgtggtttcccgccctggtattttggacatttacaaagccaaacattatgctcattaacatgatatttttcaccacaatatatttcaaactctttatctttcatgagctcaaaatcaatttgtactcatgcattatctgatgttacaaatttaaattttccagtccaacaaatgaaaatttgtaaatcaaacaatattctcacccaagattattttgggcattgtggttaaacacctattccaacgtttatagaatttttctataccaagttttccaactcttgcatgagcttcttcattttccagcacccaatacaagacatatgttaccttacctacatttcttgtaagacgaacaggtaattctccctctttaactgcattgaaatctttctgtcggtgagtacgttttatatagtgtacatcaataacaccatcttgctccaagtaaaattctgctacttccctcatcagttcttcgatttcatctaacttggtcagttttgcctcatatatgcatatttcattaaacataaaatacctccacaaattccaatttatcgatttcatatttcttttactcaagctaattataacaattatccacaaatttttctatgcacctttaatttctttacactattacatacagaaaagatggagtattcaaccatgtgaataagagtaaaaaataagcataccactatttctaatgatacgcttatcatacctgtcttttacacaaagctggacattacaaagatatgtgaatcactcaaacccactatttgacttttgtgttcccacacccgatatccactaccactgaaacattaaaatagtttttcatgcatttattactagtattcttaccccccgttgtgaacacaaaatgcttcgcaaagtgcctaaaataaaggacttctacatatctcgcttttgtaactttaccacgcactctatatgcccggtatgcggaaacatatccaccgccttcaccctcttcacctcatacccgctccccctaagatacttcacatcccgggccagcgtcgcggaatcacagctcacatacacgatccgctccggctgcattttcaccatcgtatgaagcaccgactcctcgcagccttttctcggcgggtccacaacgattatatccgcgtggattccgtcgttttcatatttctccggcagcacatcctctgcctttccgacataaaaccgggcattttcgatcccgtttatctgcgcattcttttttgcgtcttcgatcgcctggggaacgatctccaccccgtagacatgctttgccttctgcgctagaaacagggagatcgtcccgataccgcagtacagatcccagactgtctcatcgccgtggagccccgcatattcaagcgccgtttcgtaaagacgctccgtctgcaccggattcacctgatagaacgaaagcggagagatctgatattttatatcgccgatatagtctgttatatatgcctgtccccacagtagtcctgcctcacgtcccatgatcacatttgtcttctcccggttcacactgtacgttacactcgtcatccccggaatctctgccagacgctccgccagcgtatccccgtggggaattccatttccgttgatcacaatgcataccatgatctcccctgtccggtatccggtacggatcaagatgtggcggataagccctttatggcttgtctcatcataagggctgagaccgaactctttcataaaggaaataataatgttcaggatctctttattctctgctctcccgatcgcacagtccatatgtggaatgatctgatgtgtccggccggcataaaagcctgtgatgatatttccttcccgatccgtaccgacggggaactgcgccttattccggtaccggtaaggctcctccatcccgcagaccggctccatcacctcatccagcagctcttggggaacgccgccgagccggataagattgttccgcactttctcatttttatattccagctgtctggcataagacatcgcctggatctggcagccgccgcactggcgggccacgtcacaccggggcgttacgcggaattcagactcgtcagcaatattgacaagcctcgcatacccgtaattcttcttcgccttcgtcaccttggcctccactacatcgccgataaccgcgtccttaataaataaggtatagccatcaaccttgcctataccttcaccgttcaccccgatatcttcaattgttaccttcaccatatcatttttcttcataaaacactccatcttccaaaggggacagggcaaaagtgaattcgggacgtaacatttttcattttgctacgtccccaatttatttctgcgcccttcattcaactatacgcttgtcttccgcaggtttgattcaaacaggcggttatagccaagccagtcattgctgtttttgtctttgaatatctctgtcagcgtctgcatctttgcgtctgtgcagtcagcgaagttaagtgcaagtgcctcggcaagcgccggcttcttcggtgaaccgtattccagctctccgtggtgcgccacgatgcagtgcttcagttcgctggcaagcttaaccggaaagtccggtatcgtgcgcacggcgtcgcttaccatctccactccgatgacgatatgtccgagtagctgtccgtcgtctgtataatcgttctccggaaatgcggaaagctccaccgtcttgccgatatcatggcagatcgcggccgcatataataagtctttgttaagtatcggataagcgcccaccatatattcacagaatttcacgacgctcagtgtatgttccagcagtcccccggcaaatccgtggtgtacactcttggccgcggaatgtgccttgaatctgctgataaattcctcatcatttacaaaataatattccaccgcctgacgaaggtaagtattgccgatctgacttacgtatccgagcagctcttcatacatgctttccgggctcttttccgtcgtcggcatgtagtccgccggcacgtattccccggcctgcgccttccttatctgcttgatgttcagctgaagattgttgttgtagctcgtcacttccccataacattctataaaatccatctcgtcgtaatctgcgatcccgccggaattcgggtcccagacttttccgtccagtgttcccgtcttatcctgcagcagcaggttatcgtatggtttcccgtttcttgtctctgcggaacgttttcctttgcaaagataaatgttccttattgtctcgccctcctgaagggtattaatgtatctcatatagctgcctctttctttattctttacttccgaccgtcacgttaaaatcaatgtcaacataaccgccggagccctggcgctggcctcttatctttactttgctgccaacctccttatcgatcagcacggactggtacgctgagacggtcttcacctctgcgccgccaatacttgtgatgatatccccactctggatccccgccgccatggccggagaatccacctctacttctttcacatatacaccttgcgggattccctgctgctctatactctctgtgacatcgatgccgaggatcccgatatatgggacagcctttccatttgacataagttcgatcagttctttcaaatcagatatgccgtatgccgttgtaagtttcatgctgtcctcatctgaaatgctctggtcgataatgccggtcacttcccctttcaggttgacggtgaatcccgtccccttccccgtgcccggtatatccgtgcagataagccggtactggccgtccgccacatcgatgacatttttattggaggagataataccgtagccggtgccgcctgcataattaaatggttttccgagcgctatggtggtctctcccttggcgagagaattggaacttccaagcactgcgatcttcgactgcgaccacgtgctctcctggatatccgcccgtctgaccgcatagatcccaataccgaggttggaatcttttttcttcactcccgccttatatgtcttaccgtcataaaacgtgatggtgacttcattactttcttttaatatggacgtcttgccgagaatgaggagctgctgcccgttatcagcgatgataagtcctgacacgctgttcttcttatcgtagtcagcctccagccagtcgctgtctcccgatatcccgtttatctccacgacacttttagaagcttcctgggcgaccgcattaagcgcctggatcatctgccggtagctctcctcgtcgagaacctgctgtgtattgttctttgtgccgtcatcgtccgctgtgttctcttcttcttcctctttcggaattgtgactttctcaggatcgctctgaaagttctgctcaaaccacggtttaagcatagaaaagctaaagctggcagcaataccaaatacaagaccaagtccgatcatacgcagtatgctcttccttgtcttctttgtcccgccggcctcgtctttgatcgtttcctgcagaaatgaaaacgcttcctcttcttcctgctcttccgtatgttccaatggatctttctgttcttccatagacatggcaatactcctttacaatccttaatatagtataccgtatcgccggagaatgttcaatatttatccttttctttatgggacaaatagggtagaataagtctaggtgaataatatgaatcaaaaaacattaatcaaacttgaatacaataagataatagagatgctgaccgcaaacgcgtcctctcctgcgggaaaggaacgatgcaggaaactgaaaccgatgactgctccggaggagatacagatcacccaggagcagacagccgccgcctttacccggatcgtgaaaaagggacggctttctttcagtggaaacagttctgtggaagattccatgaaacggctggagatcggggcagtcgtcggaagcggtgaactgcttcgcatctgtaagcttctggagtgcgccaaccgcgccaaggcatacggacggcgcgagaattcggacgaatcgtccgactgtctcgacgccttttttgagcagcttgggccgctcaccgtgctgtccggcgagatccggcgctgtatcattgaagaggatgagatcagcgacgacgccagcagcgccttaaaaagcatccggcgccagatgggtcagatcaacgataaagtacacgacacgttaaacagcatggtaaacggttcactgcgcacgtatctgcaggatcctatcatcaccatgcgcggcgacagatactgtatccctgtgaaggcagagcacagaggccatgtacaggggctgatccacgaccagtcttccacaggctccactctgtttatcgagccgatggcagtcgtaaaactgaataatgatctaaaagagctgtatgcaaaagagcaggaggagatacaggtcatcctcgcccggctgagcgctgagacagcggaacacatccagacgatccgtacaaactgcacggttctcacggagcttgactttatctttgccaaaggctccctcgccctggatatgaacgccagcatgcctctgtttaacacggaagggcgcattcacatacgggaaggcaggcatcctctccttgataagcatacggtcgtgccgatcaccataacattaggggacgcatttgacctgctcatcgtcaccgggccaaatacggggggtaagaccgtatcgctgaaaacagtaggattatttacactgatgggccaggcaggacttcatatccctgcccttgaccgctcggagctgtccgtgttccatgatgtatacgccgatatcggcgacgagcagagtattgagcagagcctgagcaccttctcctcccatatgacgaatatcgtatccttcttaaagcaggtagatgaacattctctcatcctgttcgatgagctgggcgccggcacggacccgacggaaggggccgccctcgccatctccatcctgaaccatctgcacgagcgcgggatccgcacgatggcaaccacccactacagtgagctgaaggtctatgccctcactacaccgggcgtggaaaatgcgtgctgtgaatttgatctggagacgctccgcccgacgtatcatctgctcatcggcatccccggcaagagcaatgcatttgccatcgccggaaagcttggacttccttcctatataatagaggaggcaaagcggcatctgtccgagcaggatgagtcctttgaggaccttctcgcggatctggaggccaaccggcgtacgatagaaaaagagcaggcagagatcgcgtcctaccgcagagaactggaacagctgaagaatgaagccagccagaagcagaagaaactggatgagcagaaggaacgcatcctccgtgaggcaaacgaaaaagcccacgccattctggcggaggccaaggatgtggccgacgagacgatgcgcaattttcataaattcggcaaagaaaatatctcagccgcggatatggaacgggagcgggaacggctccgcaaaaagatggcttccacctcatccggcatgaaccgcgaggtgaaaaaaccgcagaaacagcataaaccgggggatttcaagctcggggagtctgtgaaggtactcagtatgaacctgaccggaactgtaaattcccttccggacgcaaaggggaatgtcacggtccagatggggatcctccgttctcaggtaaacatctccgacctggagatcatcgaggaagctccttcctattctgccaaacagctgcacaagacaagcaagggcaaaatgaagatgggaaaatccttctcggtgagcgcagagatcaatcttctcggcaaaacagtcgatgaggctgtggccgagctcgataaatatcttgacgacgcttcgctggcacatctgtcatcggtgcgtgtcgttcacggcaaggggaccggggcgctgcgcacagggatccacaattacctgaagcggcagaagcgcgtgaagtcctaccggctcggcgccttcggcgaaggcgatgccggcgttacgatcgttgaactgaaataatcattaaggaggccagttatggtgaacaaacagaaaattttaatcgtggatgatgatgaaaatatagccgaactcatctccctctatctgacaaaggaatgctttgacacgatgatggtgcacgacggggagaaggcgcttatcgcctacgatacgtatcagccgaacctgatcctgctggacctcatgcttccgggaatcgacggataccaggtctgcagggagatccgcgccaaatccaatgtgccgatcatcatgctctccgccaagggagaagtatttgacaaagtgctcggcctggaactcggcgcggacgactacatgatgaaaccgttcgactccaaggaacttgtcgcccgcgtcaaagcggtgctccgccgttatcaggctgtgccgaaggcagaggaaccggcggaggacaaggggaaatgtgtggaatatcccggcatcgtcatcaatctgacgaattattccgttgtggtggacggggcaaatgtagatatgcccccaaaggagctggagcttttatatttcctcgcctcctctcccaaccaggtgttcacaagagaacagctgctggaccagatatggggttatgaatacatcggcgacacccgtacggtggatgtccatatcaaacggctccgggagaagataaaggaccacactacatggggactcagcactgtatggggcatcgggtataaatttgaagtgaaataagaggaaggcacatgcgcagcacactgtatctaaaatttataattgtatatatcatcttcggattcctcggcttctttacgatcgccactctgacgtcgggactgaccgagggacgcctggagacgtatatgtccggcacgatgtacaaggaagccaacctcgtggcaagcgattatcttcccgattatttttccaaacggctgaccgcttcagacgtgcaccttcagctgaaaggcatggaatctcatctgaacgcctccgtatggtttgtggaccgtgacggtaatgtgctcgtctccgcccagtccgacaattatcccatggcgcccggccagatcgaagactttgatccggcagaaggcggcagctcacagtaccaggtcggggaataccacgactgctttgatgaagacgtgatcaccgttatcgcgccggttgtgtacaactataccccgaacggatatctcatcattcacaagcgtatgtcggatatcatggagatccgggacctgcttcttaattccgtgtacatttccatggtcgtcatctacgcgctctcctttatcatcctgctggcgttccagttcttcgtgtaccggccgctgcgcaagataacggaagccgccacccagtacgcctccggcaatctggattacgagatcccgctgaatacggaggatgagatgggctacctcggcgcctccctcaattacatgtcgtcgcagcttaaagacatggaggactaccagaaaaagtttgtggccaatgtatcccacgatttccgttctcctctcacttccatcaaaggttatgtggaggcgatgacggacggcacaataccggcggagcttcaggaaaagtacctgaagatcattttgtttgagacagagcgtctcacagacttgacgcaggatcttctcacactgaatgaatttgacacacagaatctgctgctgaataaagaaccttttgatatccatgagatcattaaaaatgtagccgcgtcatttgaaggcacatgtacacagaaaaaagtgtccattgaacttatatttgccacaaagcacttatttgtaaatgcagacaaacgtaagatccagcaggtgctctacaatctgctggacaatgcgatcaaattcagcgattcagaatcagccgtaacgattgaaactaccgagcggggtgataaagtttttacctctgtaaaagattatggtatcggcattccaagaaatgcgctcaacaagatctgggaacggttctacaagacggatctgtcacgcggaaaggacaaaaaaggcaccggtctgggacttgccatcgtcaaagaggctatccaggcacacggggaaaatgtcaacgtagtcagcacggaaggcgtcggcacggaattcagtttctccctgccgaaataccggccggaataaaggaatagataaagacgccctgtgggggcggttcactgccttcccccacagggcgtcttctttaatcgtgacggctttcctttgctccaaatcgcgtccatggacggctcgggcggtctttcagatattctttcagatgcgcgaactgcgggtggtcctttaagaattcctccgcatgaaacggcatgccgcaggaactcccccacctggcccacagactcagctccagcgcgtcgtccgcggaggcggtcactccgtcgactgccccacgcggctcatacggcgccggacggcccggctggcacatatattccctcttatccagctcatagtgggaacacaccgtcctggaacacggattctctttctccaggtaaacgtcgtaatggtccgccagtattttctgtgcggtgacattgttaagcctgcccttatacttctccataagctgagggatcctgacttgtcttgctccctgatgtctgcggatatccgcaaacccgctgtccacacattcaagattccggatgcgggcatccagcggcgcgttaaagcctgcataatatccgtcctctgtcctgtcgatctgatagaattttaatccggcctcaaaccgcatgatctcgttcgtggcgatatctcccacaagccacgtattcgcatagccgccgttgttattttccaaaaacaggcggacaaactcatccagcgactctgcatactgcaccgcataacggatacgcacaaattccggcgcgccgtcacagtcatagacgttgaaccctccgatcgtagtttccgtgatcatcagccccgcgcccctgccggtcctcgtctcataaacgtctgccaggctgtggatatatccgggcagagtctgcatgataaacgggctgccgtgttccggcactatatccgctatcacattcatataattacagttttcaaaaggagtgaagctgttgtggcccatgacgatccggccgtccgccgtgtaggagcctgtggcaataaaagcactgcagtggtcatccgcccccttgaagtgtctgtctgttcctgcggctccatgctgccctggcaggctgcggtaaatatcatctgcagcagaagggaaccagtagccggtaagttcctcatacccattccagaggatcagatcatccacggacagcgtacagtctctgacttccatctgaacgccccggaccatcccttccagttcatccagaaactccctgtacggttcccgctccatatgcgctttccatctcggaaggatgctcctttcgctctccctgaaatactcccagctgattcccgtctgaagctctgcaagccgggcagcctcctgaaccgacgcggtgatctccccggccataagtctgccataggaaacacctctttcaaatgcgctgccttccacatgtacaaagttccagccgtttttatctgtgcggtaattgtctgcattcagctgtctcaatttcttttctgtctcatcctctctgcgtccccgctttgattccggcgcttaagtcccgtgccggtgttatttactttaatataacagttttttgatatccttatctttatagttctctttcgtcacccatgtgtagccggtatttacgatcgcttcgttgccggccttcatggcagcccgcactgcggctacaacggtggcataccccatgccgaacggattctggacaatgagccctgtgatcctgccctcggaaagcgcttcgatctccgcgtcgtccgcgtcatatcccactaaagccacatctttcagttccagcctgtccatagattccaccactgcgttcactgcctctccgctcgtcgcataacagcccttcacatttggatgtttcgcaaaaaggtagttgactgcctcttcttctgtgatactgtccgcagtcacttcttcttccggtttatccccgccgtctttctggtacgttccagcgttgatctcgtccgccacccgcttttgcagctcaggcagctggtctctgtggtaggcgtccacaacagtgacgcccggatgctgctccgcgatctgggcagtaaaagactgttcccgttcctgtgacgacttggatttggaatcatttgcaaaaatgataacttcccctgcctcgttgacagcctccgccagcttgtcagctgctgctctggcgcttttgtcattatctgtctccaccgtggccatcagtccctggtaatcacttccggaatcgaatgcaacgaccggaatatctccttctgccgcaaggtcgaactgcacgtcacacgcctttgcatccaccatggagatcccgagcgccgccggataacggtccagctcttcgtccagtatattcacctggtcgtccacatcataggcagtggcaggaccgctgtatgtcactttgatcttgtccttccccttatatcccagctccttgttcaaatctttgacggcctgtaagacgcctttttcgacagcctcccagtattgaccgtcagaactctttcctatgatggaaagataagagcccggctccagttttaatccgttcacattgctgtacgcccttggctgtatgatatcgagacttctctgatattccttttctgtgctttttacctttttatcttctgtattttctgcttttgcatcacttacattccctgctgcacacgcacttgacagtaatgtcacgcagagcgcggctgcaacggcactccataattttttcataaatcccactcccatatctgataaaatctgcttttccaacaaacactatacactaaaacagtgaaaaagtgttgaaaattttcttaattttatatgtgttttaagcttgtatactgtatccgatttagtacaagcaaatatattgacgagattatatgttatcccatataatgatgaggaaataagttagtcatagttaaccattattttacagttttatataataacaggaggagacattatggaacacaaatggcacgcagaaagctgggacggcttccggccgggacgctggaaccgcacatctgtcaatgtgagagattttatacagcttaactacaccccttatgaaggagatgactcttttctcgcgggtccgaccggcgctaccggaaagttgtgggaccaggtgatggagctgtcaaagcaggagcgggaggcaggcggtgtccttgacatggacacaagcatcgtctcaggcatcacctcacacgggccgggatatctggacaaggacaaggaacagatcgtgggctttcagaccgataagccgtttaaacgttcactgcagccttacggcggcatccgcatggcagaaaatgcctgcaaagaaaacggttatgaagtggatcctgaagtcgttaagatctttacagaatacaggaagacacacaaccagggcgtctttgacgcttacactcctgagatgcgtctcgcaagaaaatcagctatcattactggacttcccgacgcatacgggcgcggacgcatcatcggagactaccgccgtgtggcattgtacggcacggactggctcatcgaagacaaaaagcagcagctcagcacctctctcgtcagaatgaccggtgataatatccggctcagagaagaactgtccgagcagatccgggcgctcggcgagctccggaagctgggagagatctacggcttcgatatcagcaagccggccaggaatgcaaaagaggcggtccagtggctgtactttggctacctggcggcggtgaaggagcagaacggagccgccatgagtctcggacgtacttccaccttccttgacatttatattcagcgggatctggacagaggtctcataacggaagaacaggcgcaggaatatatcgaccactttatcatgaagctgcggctcgtgaaatttgcccgcacgccggaatataattctctcttttccggtgatccgacctgggtcacggaatccatcggcggcatgggcatcgacggaaggacgcttgtcacacggacttctttccgttatctgcacacgctggacaacctcggaacgtcccctgagccgaacctgaccgtgctctggtcaacgaagctgccgaaaaatttcaaagaatactgcgcaaaaatgtccatcaaatcttcatccatacagtatgaaaatgacgatctcatgcgggtcacacacggcgacgactacgctatcgcgtgctgtgtgtcctccatgcgcgtgggcaaagagatgcagttcttcggcgccagggccaacctcgccaagtgcctgctctacgccatcaacggcggtgtggacgaacgcatgaagatacaggtcggaccccgcttccggccggctgaaggagaatacctggactatgacgacatcatgtccaaattcgacgatatgatggaatggctggcaggcctttatgtgaacaccttgaatatcattcactatatgcacgacaagtacagctatgaaaagctgcagatggcgctccacgaccgcgaggtaaaacgctacttcgccaccgggatcgcgggcctgtccgtcgtggcagactctctgtccgccatcaaatacgcaaaagtgaaaccggtccgggatgaagacggcctcgtcgtggactatgaagtggaaggtgattttccaaaatacggcaacaacgacgaccgggcggacgatatcgcagtggaggtcgtgcgcagtttcatggacaagatccgcaagcaccacacgtaccgccactccgttccgaccatgtccatcctcaccatcacatccaatgtcgtatacggcaaaaaaaccgggaatacgcccgacggacgtaagatgggcgagccgctggcgccgggcgccaatccgatgcatcagcgcgacacccacggagcgctggcttccctcgcttccgtagccaagataccgttccgccatgcgcaggacggaatctccaacaccttctccatcattcccggagcgctcggcaaagaagaccagatattcgccggagacctggatctggacagaatagaagactgcaaagaccttgcatgtaatataccgaacatcgaagacagcatagataacgaataaccatcaaaggaggaactgttatgacagtaaataaacaacagatagataaccttgtagcaatgctggacggatacgtagaacagggcggacaccacctgaacgtaaacgtattctcaaaagagacgttactggacgcgcagaagcatccggaaaactatccccagcttaccgtgcgtgtatccggatatgcggtaaacttcatcaagcttacaaaagagcagcaggatgacgtcattgcccgcaccttccacaataacatgtagggacagggtaagacgcggttggggacggggtttttttcaaaaaaccccgtccccaaccgctcttcgtcctgtcccctctatagaaatggggttgatctattgaagggatttatacattctattgaaagctgcgggacggtggacggtcccggcatccgttatgtcatctttttccagggctgtccgatgcgctgtcagtattgtcacaacccggatacgtgggagccggggacggggagtacgatgagcgtggaggaggttctgcagggattttattccaaccttcctttttaccggagcggcggtgtcacggtgaccggaggagagccgttgatgcagatggacttcctgaccgagctgttccgtgacctgaaaaggcacggcgtccacacgtgtatagacacatcgggcattatgtttaacccgcacaatgagacttttatgagccgtcttgatgaattattatcattaacagacctgatcctgctggatatcaagcatatggacgacgaaagacacaaggcgctgaccggtcattccaaccaacggatcctggacttcgcgcgttacctggacaaaaaacaggtccctgtctggctgcgccacgtcattgtcccgggcattacgttctacagggagtatctccagcgtctgggccgttttatggccaccctcggcaatgtgaaggcgctggacgtccttccgtatcactccatgggccgctctaaatatgagagcatgggatatgactacccgctgaaggacacaaaagaaccctcgaaagaggacgccgaagcggccagaaacgtcatactgtctgcctataaaaaggccaaaaaagcgcctggataacaggtgcttttttcaaactttgtacttaatttaaagcatgattttacttgtatatttaatttatttgtattatgatagggatagacaaaattggattatgtctattgataattaagaaggagggtacatactatggcacacgtaattagtgatgaatgtgtaagctgcggagcttgcgaagctgaatgtccagtaggagctattgctcagggtgcagaccattatgaaatcgatgcagacgcatgtgttgattgtggtgcatgtgcagctcaatgtccaacaggagctatttctcagggctaatcggtttttttatcaagtgataatgaaaaaagcattgctgtggtcaattcagatctcagacaatgcttttttattaccgccgttttacaggctctgttacattctaccactccgcgacagaaccgtcctcgtggcgccataccgggttcttccaagcgtggggcgtctcattttcacttactacaagatccctgttgatctctgctccgatgcccggcagacgcggcagagacgcaaatccgtcctcaaagcagaagtcttccttattgtagacataatcaagtaccgacctgcccacattataatgaattcccatgctctgctcctggatcaccgcattgtacgaacaggcatccacctggaagcagctggccagcgcgacgggaccaagcgggcagtgaggcgccagagccacatcatacgcctccgccatggccgcgatcttcctcacttccgtgatccctcccgcgtgactcagatccggctgcacgatcgacacgccccctgcggacagcagccgcctgaagtcgtatttcgtgtaaagcctctcccccgcggcgatgggtatattacagcaggccgcgatctcggaaaatgcctccatgtgttcacacagcacaggttcctcaataaacatcgggtcaaattcctccagcttcttcgccaggatctttgccatcggcctgtgcacccgcccgtgaaaatcaatggcaataccaaagtattttccgcaggcctctctcacagccgccgtccgttcaagcaccgcatcgatcttctcataactgtcgatcatctgcagctcttccgtcgcattcatcttgacagcccggaagccttcctccttcttcctcagcgccgcatccttcacatccgaaggccggtcgcctccaatccagctgtagaccttcatcctgctccggcaggcgccgcccagcagttcatacaccggcgcgccgtaatacttgcccttgatatcccagagtgcctggtcgatccccgcgatggcactcatgagcaccccgccgcctctgtagaatcccgcgcggtagagcgttgtccatatatcttcgatatgaagcggatctcttccgtacagctcgtctgccatcttctgcacagacgccagcaccgccttcgtatgtccttccagcacaggctcgccccagccggtgaacccgtcatcggtgacgatctcaacaaagccccaccgcggccggaccgcatacgtgtttacttcagttattttcatggcagcgcacctccctgcctggcagcctgctgtctgccagaagcttccggatatactccgctccggcttcccacctctcattccttacgatctcctccggcatcagcccgccggccattccgactcccgcgtacccttcctcaaagaactcgccgatattggccggcgacactccgccgatggcgatataatttgtatcgtcatacggccccttcaacgcctttacatatcctctcggcacacttttggccggaaacagcttcatcgtccggaatccatactgcaggcttaccgctacgtcgctcggcgtcagtaccccgggcagaagcatgatgccgcccgccgcacagaactcgagcacattgagcggagtccccggtgtgagcaggaactgcgcccccgcgtccagagccgccttagcagaatccacggtgatcgccgtgccggctcctatcatacagctgtctccaaaatgttttctcagcagcctgatctgttctatgccatccctgctgttgagcgcgatctcaaaaaatgagatcccccctctcacaacagtctccgcataatctaccgtatgctccagcgggacatttctgaaaatggccagcaccggattgtctgatatgatagaatacatatccattttcatcgtcctttcgcagcttacactttatttacacaatacttcggctttccaaacagcagcgtctccgccacattttcggcagtcttgcgttgaagctccacgatcgcctcctccgagcaccagcccatgtgaggcgtgataaatacatcttcccggtgaagcagcggagagcttccgaactcttcggtcgacaccacatccagtccgcagtaacccacctttcccatatccagcgcccgcacaagtgccgcctcatctatgagcccgccccgggccgtgttgacgacagctgctccctgctttatcagaccgaaagctctgtccgacagcatatgctccgtcgtaccattaagcggcacatggagggagatcacatccgcacagcttacagcctcgtcaaaatcgaggaatctgtactcgggatacgaaccccggtccttaacgtacgggtcgtacacaacgatctctttaaaaaaggacttcatcttccccgccacattccgggcgatattgccaaaaccgatcaggcagagcacctcattttccatacgcccaaccggcctgatcttcgccatgtcaaattcccccgcaagcagcaggctgttcgcccgggcgatctttctctttgcgttcatgatatgggcgaccgccgtatccgccacctcgtcgatacagtaatccggcacgtttgccacgcagatccctcttgcagccgccgcttccacatctatcgtatcaacgccgatggcatatcttgcgatcaccctgcaccgctccatgctgtcgatgacctctttatttacttttgcaaactgaacgataagcgcatccgcatctttcacatacggaatcagctccccgggctccttaatgccgccctccgctatcttagtcagatcgactatcccggtctcaccgagccgttcaaacaccttgtactcttctttcagatccggataataataatccgctatcactattttccacatgctatgatccctgccctttttgcaatgctgagcataccgtctatgctcagacggtcaatctgctccttgtccgagatgactgttatctctgccccgacatattttttttgtaaaatgtattcataaagcctgcaccgctctttcagccccacaagcacaaaccgctgcgttccactgccgccgaacatatccatctgtccaagtgagagcatatcgtccgcagctatgagcgcttcaaaaaacagccgcctctcataccatttcgtatccagaagtacatcgagaaaacgcggaaacataaaggaacgtataagccccgccctctgaacccacgcggccgcgttctccacaatatccgcgtcaaaataatcttccggcacactgctttcatcgccgtccagcgatttcccgagaaaggtattgttcttgaccgcctcatacgtctgcccgctcatcgtcgtaagactgccgaggatcctgccgtcttcttccacggaaataaactttgtgtgagaagaaagaatcactatcgccgcaggcagagtcatgccggcgctttccatgattccaacggcctgcgtctcctccccgcgcataaaatcaaggcacccggccgctttaaaaggatcctccggcgcctcctccattttatttttgatacctctcacaaaatagaccggttttcccccgtacagatccagcccttccacccgctccatatggccggccagctcgtttacgccgcacggggcggtcagatgcggcagctcgcacagcccgatctccgacgtgatcatgcccgaggataagacggcgcagatgtccgcttcccggactcccgcagcctccacagctttcccgaccgtctctttgagcccggccgccagcgcttctttcgagcctgtgatggatgtgtctctcacccctaccttcttcgatgcctgccccgctatgctgccgtcttccctcaccacatatgcccttgagttcgtcgtcccgcagtcaatgataatgttatacatcagattacctccagttccttcagcgcttctttgatcgcttctttctcccctgctgtgggcggcaggaacggcctgcgcggatacgcggtcataatgcctctgatctctgcgatggcatagatggccagctgggtggagcctgccagatacataatatctctcagcttgttgataaggaactgaagctccctcgccttctctttttcttctttcatggacgcctcaaacattgccccgcacagttccgggaacacattgccgatgcccgggatatatgcccggcatccaagagcgtgcgcagagatccagagcgcctccgtgccgagcgcaaggtcaaaattatcatccacaagctctctctcatagatcgcataattcatcagatcaaaggtggcatccttgatgcccgacagacctgcgttctttaactgcttcatgacattaaggcttgtctcatatccctggaacttcgggttgtgatatgcataaaacggtatccgttccccggctgcgtcgatcacgtcagaatagtaacgaatcaactcttcatctccgtaatggaagtaatacgggccgaccgcagccgccgtatcacagccgatctctgccgcgtggagcgtcagctccgtcgtatcctttgttgtaagcgcgcccgtatgtacgacgatcatcgtctcttcggcggaatattttctgacgatctccgccactttcttccgctcctccaacgtcatcagcggaccgcatccgtaggaaccgcagatgaacagtccgtccaccttcggagataaatattcgaccagcttctggagattatattcatccagacgcccttctgcgtcaaacggggttatcatgggaggtacaacaccttttaattttttcatgacttctgctccttttctttagactattgctaccatattcacaggtccggcttccagcccggcaaatcttaccggaaatgcgcagacggcccgtaccatatcttgttctgccaatttcttaatatttacatcctcatacaaaagaagggtgcgctctgtctgttcttcattcgtctccagcagggcatggtgggacggaaacccttccgccgccccggtaacagcgctgtcaaaacttatggaatcgagcgccaccgccttaagcccggggaagttcttcctgagataccgggccgcatccggcgccatggacggaaagtcagatacgaatttctccggactgctttccctcaagtccgaatatccggtgtaaagaaagagaatatcacactttgcgatctcttcctcatgaaccttcagttccgccagctctacccgctccccttcagacttcatcagcttcagtacgagcggcgccgtataatagaagtcttccgccgggatctcatcgatcgtccttcccgtcttatcgaaatgaaagggggcgtccacatgcgtaccggtatgtaaatgatggtataccgacgatgcattgcacgtgtccccgaaccggaacgcctggttgtaatcatacttctcttccggattcgtcggccacttcggcacatgttcgcttatcacataactcagttcgatcaacatatcactcaccactttcttttactcttcatccggtttcctgaaaatatatcctttgcgcagcatatcaaacaacaatgcgatgatgatgatgagccccatcacaacttcctgcagatatgcattgacactcatcagattcatggcattgcttatgatggtcagaataagcgccccgacgatcgtgcccgcaacgccgccttccccgcctgtcatgctcgctccgccgataacgactgccgctatggaatttacttccatcccattgccgatcgtactcgtggatgacagaagcttggatgtgagcacgatccccacgagcgcggacataagaccgttgatgacatagacggaaaactctacgagccttacgttgatcccgctcagccacgctgacttcctgttactcccggtggcatatactttacgtccatagcctgtatacctgagaatgacataggacaggatatacagcgcaaacataagccatacacagatgggaagccccatgacctttttcagtcctataacgctgtattcgatcgggagccctatgatcgttttccccatggatatgtaaagcgccagtcccgccgtcacgctcgacgatgccagtgtcgctataaatgacggcattttcaggaccgtgatcagtatgccgttgaacatgccgaccagtatgccaagcccaagcatcatgagtacggccgtttccactcccacggtcccttccgccagaaatttcattcctatcgtagccgtgaacacgatacagccgcccaccgacaggtcgatcccgcccgtcagtatgacaaaggtcatgccgagcgccgatatcccgctcgtcacggactgggtaagtacattgcttaaattggacggtgaaaaaaacttatccgtgaacagagacgccaccagacacataagcaccagtattagaaaaaccgaaccctgtgatttcataaagagttttaattttttattcatatctcttctcctttagtgtcatttacattacttgtctttgcagttccgcctcggtgatgctgccgttgttcatctcgcctgttatccttccgtccttcaggacaagtatgcggtccgccatgccgaatacctccggcacctccgaggacagcagaagcaccccgatgcccgcttccaccatctcgttgatgagattgtagacctccacctttgcgccgatgtcgatccccctcgttggctcatccagaacaacgatcttcgcctcggtcgcaaaccattttgctatgacgaccttctgctggttccctccgcttaagctgctgaccttctgcctcggagtctcgcactttatcttcagcttgtctatgagacgttcatttgtgtctctctcctttttcagattcagaagtccgagcctgctcagctttctgagcgcggcgagagaaatattaaagtctatgggctgttccacctgcagtccctccgagcctctgtcctctgagatatatccgataccggcttttacagcctgggcgggcgccgcaaatcttgcgtcccttccgcccatatatatatttcctgtcagccgtttatttccctttccatatacgccgaacagcgctttcgcgatctctgtctttccggcgccgagaagtcccacgatgcccagcacttccccttttttcagttcaaatgagacgtcgttcaggcggccttccagagagatatgctccatcttaagcaaggtctctcctgcctcgcagtgtatcttcggatatttattcttgatcgtccttcccaccaccatctcggccagtttatcctcattaatgtcctctgtattgaccgtagctactttcttcccgttattcaaaatggtgatacggtctgtgatctccatcatctcatccagtttatgtgatatgaacacgacagaaatatttttttccttcagctgtctgactatcttaaacagattctcaacatccttcttcggaagagccgacgtcggttcatccagcagaatgatcctgcagtttccgttcagcgcccgcgctattgccacgatctgctgctgggcaatactcagccggtccagccgttcatcgacatcgatctccacatcgatcatgcggaggatctcccgggatatctctctcatccgcggccagtcgataagcctcatgccatttctcggtaaattgccctgacagatattttcggctgccgtcaggtgcgcgaacaagtccagttcctgatataccatccgaatgcctgctcttgacgccgcgtggggagagtcaaatgatacctttccgccgtctatgtatatctcgcctgcactcggtgtaagcacgccgtttacgattttcatcagagtagacttgcctgcgccgttttctccgagcaggccgtgaatttcccccgggcgaacgtcaaaatcaacatcttcaagcacagtgacaccgttgaactgctttccaatgcttttcatgatcagtccctgtttttccataattaactccctttcagataatagaattgtcagagggtgtatatctcaacaccctctttgatcaaagaagtttattcgatcgtatactgatcccagacgcttgccgtttcactccaatacccgtcgtcgatattaaagttgccccagaacgccgcatcgtccacattgtccttcgtgatgacggtggcgtccactgtgatcactttaccgcccagatcctcgcctttgactacctttgtcagtaccgcttttgccgctatcgtggccatcgcaagcggagaattgtcaaccgtcatatcaagtacatcctgacggatatagtcgagagccgatgcggctccgtctatagatacgatcatgacatggccgtcctcgccaacatttttcaatttatcagactgtgtaagagcagatacgacaccggcaagcatacaatcgctgtgcaggaatacagcgcccacatcggaatctgtcgtcagcacatcgttcattgccgccatcgccttttcagaagaccactcgcacggattatcccggatgttgtccagcccgtcagactgtacgccggcgctgaagccttccgcccggtcgtctgccgttgctgttccgagcgtcccctgcatggtcgtcactttaacgcctttttcttttgaattgtcggcaatatatttggcacacatctcgcccatcgccttgtcatcgatcaatacgctgtaatctaccttgcagtcgccgtagatcgttctgttgacggcgatcaccttcacgccggcgtcattacatgccttgatggccggcgccacagcattactgtcggctgcctgaataagcaccacctctacccctttttcaataaagtcatatatctggttacactgattctcggcatcaccgtccgcactgctcaccgtcacatctgccccggcctcttccagtatgtactgcatatatttctgaacgacgataatatactcactgtccagttccgcgaccgtaatggctgctttaacaggcgtgccgtcctccttgaccgccagatctttcagcacatcctttgtaaaatcctgcccttcctgttctgtctttttgtccgcctttttgtctttcttgtccgatttaccgtcggaacccttacttccacatgcggccagcgacaggaccatcacgcttacaagaagcagggatgctgcctttttcatctgaactttccattttttcatagtgtcatcctccttgaatttttctttgctttgattgaatgatacgacaaatgctttatgatattaaaatataatttttttattttattgtcaatatatttttgtaaatttgtttattttccattattttacatcaatttttatgtgcataatgcttatataaataaaaaaattttattattttcgatttgaattttgaaaaaggttatgttatatttgaagtaagaaataataaaaagggaggttgcttatgcatatagacactgaccattatcccacgctggcaaaaatcagcgaattatatccgcagctgacaaagggacagaaacagctggcagactatattcttaagaatccgtctgaagtggtcaacaaatcgatcactgacctgatcagccatacgagcctgaagagcgaggcttccgttgtaaagttctaccgtctgctcggttttgacggctttaagtcttttaagatcaaactggcccaggaacttgtaaacagaaccttttatcactcggaaagcgatattacgatcgatgatgaaccgacagagatcaagaaaaaagtatttttaggagccatgtcctcgctcagcaagaatgcagatatcgccgccggggaatgtatggatgcccagaaactgctctcatctgccaaacgcataatcatcctggggcacggggcctccgcctctatctgccagtatgcatttttcaggcttaccgagctcggactgaactgcgtctgtaatcaggacgcacatatgaatgccgccatcctgacccatccccgcccgggcgatgtgatcttatgcgtctctcagtccggtgagactgccgatctgtacaagcagatcgagatggcataccagcgcaggatacccgcgatcctcatcaccggcgcccctggttcttccatcgcaaggctgtcacaggtaatattgagtacagtaagcgaagagcggaacattcttaccgatgcgctgaactcaagagtatcccagttctgcctcatcgacgcgctgttttctatgataagtattgcaaatgcaaatgaaatgctgccgaggctgcaggatacgagaaacacatttaagaaatataaactgtaacaaatgctttgattgaacgagaaatacgacaatgcttatatttatttttaccaggaaaggaaagaattcatatgagcgcttatacgatcaccattgacggaggcacgacgaatacccggtgtatcctgtgggatgaccgcagaataaagaccggggaggccaaaagggaagtcggcgtccgcaacacagccattgacggcaataacagccggctgaagcacgcagtaaaagaatgtctggaacaactgcttagagacacttctatctcctatgacgatatcagccatatcatagcaagcggcatgatcacctcggacgtaggcattgtggaagttccccacctgaccgcgcccgcagggctcacagagatcgccgctgccacagaagcgatcacgcttcccgagatctgcccgctgccgatacacttcattccgggaataaagaattctgacggccaaattacgtttgacaactatgaggctatggatattatgagaggggaggagacagagagcctcgccatcattcacacatgtcacagggggacaccgctgcttctcgtccttcccggctcccacaacaagtttgtatctgtggacaaggacggccggatcaccggatgcctcacctccatatcaggagaactccttgcctccatcacaaatgacactattcttgcaaagtccgtggggcgcagcttcgtgacggcagaggactatgacagggactggctgcttctcggctacagcagcgccaaaaaagccggtctcgggcgcgcctgcttctccgggcgcatattgagcctgtttaaagaaaagaatccctccaaaatagccaattacattctcggggctgtactgcagggcgatatcaccgctgtaaagaactcgcaggccgtccgcctgaccaatgacacacaggtggtcatctgcggaaaagctcctctgaacctggcgcttaaggatatctttcaggcggaggacctgttttcccatgtcacagtatttgaacccgataacggtttttccgcgtcagcgctcggagcatatctcgtggcggaaaagatgcggttattataaggaggagaacaaatgaaggtagtgatcacagattacgagtacgagaacattgagacagaaagagcgatcatagaaggcgcagggttcacactgtacagctgccagctgaagaggccggaggagctcctcccggtcctaagagacgcggacgccgttatcacacagtattcttccatcacctccgaagttatcgaaggcatggaacattgccgcatgataatcaaatacggcatcggcgtaaacaatatagactgtgacgccgcagccgcaaaaggcatcctcgtatgcaatgtaccggattacggaatctcagaggtgtccgaccacacatgcgccatgatactggcgctcggcaggaagcttatgccccttgccggcgcgctcaaatccggcggctggggttattccagcgccgttccgctaaaaaggctgtccgaatgtacgcttggtctcgtcggtttcggacggatcccgcagatggccgcaaagaaaatgcgtgcgttcggtatgcgcgtcagtgcgtatgatccttttgtaagttctgagacaaccgcagaacagtctgtaaacctcgtctctctcgacgaactgctccgtacgggcgactttatttccgtacactgtccgctcaccagagacacgtttcacttaatcgggaaagaagagatagagaaaatgaaagcctccgccttcctgataaacacagcaagaggaggcattatagacgaaaaggcattgataacggccttaaaggaaaaaagaattgccggggcaggaatagatgttttcgaggaggagcctgtacatcccggccatccgctcctaagcatggacaacgtcatcgccactccccacagcgcctggtacagcgagaccgcgatccgtacgctgcagcgaaaagcagccgaagaggttgtaaatgtcctgaagggcaacaaaccatttaaccgtgtggtctgaatgtagtctgagtccgtccggatgctttacggtgcttcgcttcgcataagttcatacagggccgaggacagcttctgtatcccgtctctggctgcggccgcgtccgcaagcccttccgacatgacgcaaaggatatacggttcctcctccccccatatgagcgccgcgtcgttttctaccgtgtccagttctcctgtcttattggccgtgacagttcccgcgggcacccctgcgggaatctttccggtccgcgtctgttctttcataagcccggtgagctgctctgctcccgcaagctcctgccggtataatctttggagaaaaataccgcagtcttttacagacgtatagttatcgtcctgcgcgtcaaaatcgagcatcagccgtcccatatgagtatctgcaaatccgtgtgccgccgcgaacgtattgaccacgttcatccccgccgctgcgtccccggcgccgagacgcttcacgagtgtgttggcagcctcattgtcgctcacagttatcatagccttaagcagcgcatcggtctccgaaccgctcccctgtgcctccgcctgctctttctgctcaagcaccgcggccgctataaaaagcttgatcagactggccgactgcatgggcttattatttacagaggcctcccggcctgagaccagtccatatacatacacagcacattcgccgcctccggggaagtctgccgccagcttctccgcctgtgcctgaaactcctgcaccggtgcggcggcgccgttttgctccgtccgtcctttgtcctcggtcgttatgaccaggttctttttctctgtcctcgagccgccgttctcttttacgtcttcgcttttaccgccgcagcccgttatacagagaaccacacataatagagcggtcagcgcgcccttttttatcttcacattcagcacagccgttccctccattgttatcgctgttcaaaatatttttccaggccgtttacgatgccgtctgccatcttttcctgaaaagcatcgtcggccatcatcgtgtcatcgtgttcattcgtcataaatcccatttccagtatcatcaccggtatttcactccagttaagcccggtcatcgtatcattggcctggatccccatatttgaaaatcctgtagcctcacagtaggatgataagacagcctccgccagcctgctgctttcgccgtacagccggcccacatacggattgtcctgtgacatgacaagacagagcgctccttcgctggccgggctctcacttccgtttgcgtggatcctcacgcacacatccgcccctgcctcattggccatctgcgccctttccttattactgattgccgtgtcattatcctcccgggccattacgacatcgtatcccagcttctcaagccgctctttcactttgagagaaacgtccaggttcagctcatattcacccagtccggtataacggccggtcgtgcccgacgttgctttctgtttcatcacgccggatcccggagcattttcctcttgtgcgctcatatcgacatgcggtccctgatgtccggggtcgaccgccactgtgaaccctttctttttcacggtctcgggtacgagtttttcccggtctgcttttgtcatctttccaggcacatcctttcccgcacttttggagaccggactcttttttgcttcaaacgggctctttaaaatgtacacggctgccgccacgccaaccgcgaccagcagtatgagcgtcatggccacataaattctttttttcttcatatcccctcacctgctgtcactgcgcatccagcggatagccgccggaattaagtgaaaattcttttttgcggagcagttccgcattctttttttcataatcattcagtacgctctggctgtaatttgcatcaaaatcgtccgcatcatactgtcccgtataccagctctgactgttgaaatagtcctgcagctccctggatttgaacctgcgtccgtgtcttgcatatatctcattcttggcatagttcaggtctctcagtgtcaggccgtctatatccgcatccgtaagatacacagagtcactttcaggcagaatgtatcccgcggcacttgtctctttttcctccggctgttttaccgtttccggcttcgtactttcctttgatttttcttgtttcttcttactgctgtcgtttttattctttgtatcctccgactttgtctcgcttctgcctgcatccccgctgcttcccgacatgacccagaaaatgatccctgccaatatggcggccataatgaccgctgcgatgacaactacttttgtatttgacttctgttcaattctgctgccgcactcagggcagaaaaggtcatcctttcccaccggtgttccgcacttctgacaccgcatattttcattcctcctcactgttcaccctaatatactttttctcaaaatatatctcatctctatatcctctggccgcactgtgcacagaacagagagcccggtttcagctcacttttacagtgagggcacacattctcatccttttcgttttcttttttcagtctcgtgatcttgtcgaaaagcggcagaagctccggaagcggatcctcaaactttccctcgtaatatgctttcccaagttccatatacgcctgctccagtcccggctcctggctgcccttttcataatttacaaatactgtcttatcgttgtcactcatcttttccactctcctttattttatctcgctgacgaccgcgttatcgatcacataattgcggaaataatacgccgtatgtgcgtctccccgcagattgcctgtaactttaacatgctttccgtcccacgattcatccacatcgctgattggattaaaaagctgtatgtctgtacagttatcgtaggtgacctcttcctcagctcctcctccaacacggaatccggcaggtatatccagcttcagcagaagagcttgcagttcctgaccgttcggatgcgtccccgtttcaaactggatcactccggttagttctaccggcccgctgtcatagaccgtatagctttctcccgggccgccggtgtcctgtacatcttcatctgatccacccccgtcttcttgctgcgcatcttcgctccactcatatatctcaagcacgccccatctgccgtcctttttcacccagcatctgccctcatacaccggcaggatctcttcgtatatgccggaaggtacagccacgttaccggcagtatcccgcagttcccactgcttcccgctgcggagcacgacgtaaccttctgacgcggcataacaatagtcttcgtatgcctcgccgtatggatcagcagaagtataatactgccaggaagcgtcaaattcagcagggatcactccctttccgctctcgtccacatacccccactttccgtctctctttacggcaagcagtccgtccgcagccgagccgcattcttcgtacacaaagtccgtcaccggcgctccgccgttatagactgcatacagtccgccgttctccttccactcacggtaactgtcgtcaaatatatctccctcaaaaggcgtctcaaagtgctgcaccggaaacgcgccgtccggcacctccttgtggaaatcatagaagcttcctccgcttctctcgagaagacttatgagttcaccgccgctttcataaaatacgtcatagggcggcatccccccgagtcccagcgccggttctatctcatccataccctcgggcatacggtacatcgagcactgtccctgtgctttgtcgtcatatacgggttccgtcctctccatgagatagccccctgcctcgatctgtatgtcttcataatccaggccgccttctgtccggccgtccattccgatcagcccctttgcctctcccttctgtatgacagcatacggagagaggtattgctttctaagttcgtttaccggctgctcatagtaatcattttctgcaagataatagatggcgtcagcttcaacctgaggttctgtctcccacacagccgtataattacttttttgttctgctgcctgcttatcctcttcttttttctttgccagctttctgcgattcttctgcggcactttcttatccgcctccgccagaatgctctccgctttttccggctccccgtctgcctcatacagttgcgccagcttcaggtatggttcctcctgtttcggatcgatggcgatggcctgcaggtactcttcctctgctttttcataatccattgtctccagatacttatcggcattggccatgtactcctcgtatgcctccctggcacttacatctttcatcgcaaaatagccggccaggacaacggcggcggcaaggactgctgccgcgcctgcccacagcctgattttttttactttcttctctttctctgtctgctcctgcggcggctgtaattctgctccgcatttaccgcagaaacgcgccccctcatcgttggggctgccacacttacggcaatacatatcttatcctctgtcctttcatctaggccagcacaaaggcgtgccctctgtctcctatatacacttctgttccccgcggcaaatggtaacaccggtcacgcccgagcggctgcccgcttgtgagaaagaaactgtttttctcataaggctccacacagtattcctcatactcactgatatagtatataccagcggtactatttccgctcttttcgccggttataagtacctctcctgtaccgtcttttatgaaaaatacctgtactttttcctgaagcggatacactttggaggcatatcttccgttccgtccccctatggcgccgtgaaacgtgctcccctctggctgccccgcggcacgttctgtcgccttccgggctgccttcctctcctgctccagctgcccgatgcgttcaagatatgcctgtttcttcggatccaaatctgcctcccacggatttttcctgtcgcttaggttctccggcataatatcccgggctccctctgtcttctgtccgctctttcccaggacgatcccgcaggccgacagcccgaaaatcaccgcgtacaataggatccacaacactatcgtagaaacgtggaaccgaattccgctgctaaggccaaagaagttgaacgcgctctccacctcgtctatttttccttttacagacacacacagtatgatcacgagcacattgttgacagccccgcttacaagcgccgcgatataagcctttgacgcatcaagcaccaccgtcagaaatgctcccgcaagaattaggatgatgaggatgacgactgtgatgatgctcggtctcagatactctttaaataattccatcacttctcttatcagttctgtgtctccgtacgttcccacaccgatcttcaggatatccatcaccgacattttcatggctcccacttctatgagcggcatgaagccggccacgagcgagcaggccagcagcgcgcccaccgcgtatttcaatttttctttcatctttctcctcccacttactctgcctctatctcgtcgagcagttttttcctctgtctgtcaaatatttttctgctggcagccagcgccgcggtacatccggcgattccaaggacacttaccgccgtgatgatccatcctgccgttatacccattataaccaacctcctgcttttacctgcgcgtatacattttccaggagctgcatttccgcatctgtatcgttccctttcagctgggcgtaatacagctgccgcgccttctcaaaataaccggcgaatgctttgtaatccctggcattattatcctttaactcctgacggtccacctgaaggaacgcataccgcttatagatattgtagtcctccccatatagctgtatcatcgtctccagcagacgctccgcctcgccgatctctccctgcttctcatggagtatgacaagattgtcgtatgtgtcatacgtctcccacccaaggcttaccacctcgttcaatacgtcgatggcttctgcccggtatccggactgtcccgcttccgccagttcgatatcagcctgggcaagccgctccagtatgagcatccggtattttgccggcacagccgctctggcttccgccagtatatcccgctgccagacatcctgtccctgcatcttatagatctcgcttaacatcacgtaagcccggctctttaacgccatgtcgtccgacaggctgatgcactgctgaaaatcatttgccgccccggccagctcattgagcgacttgctgatctctccctttgcgtaatagagcgaatcctccttcagcccgtactctgccgcttcgtcgagcacctctttggccttgttcaccgagccgttgtatgccagggcaacggcatagtctctgtaatatccgctgtcgtatccgccgagcttaaaaagctgttcgtacgcattcaccgacttttcatattctccgagctggaaatgactctccgccttcaggtaataaatatccgccatccgcttttttaacgtgtctaccttctcattttccagaatgtcatagtcgataaattcaatacattctttgtatttctgctgttcatacagtgcatatgcattctgataataactctcaagcgcgccgggcagtatttttaccgcttttttatatgtatcttcctctttttcatattcaccgtcctgccgctgctttttctgacggctgacgagttcattgtaagccttcgtcttttctgctttgatcgtgtggatgccaaagcctccaagaacgataaaaccggccgtcagcaggacaagtcccgcccgtatgcctctctgcctgcgaagaagcgcttcatatctggcatcctgcttcgtgatctgtctgaacgcctgaaacatgtcaaacgcactgtcaaaccggtcctccgggtctatctgcatcgccttctctatgaccttcgcaaaggcctcccccgttttctccgccaggagctctctgtctatcggatccctgtagctctctgtcttcttccctgacacaagatgataaaacgtggcgccaacgctgtagatgtccgtcttctcatcaatactcgaatactgcggcagactgtgcaccgactcgctgtccagcgcgatgatatactgctccggagacgtatatccgtccgtatatccgagcacggtattctcatccataaagaacgatatattaaagtcaataagacaaatatttccctccggtgtcagcatgatattggccggcttgatatcactgtgaatgatgggcggtttctggctgtgcaggtaatttaaggcgctgcaaagctgcatcccccactttataagttcattctgtgtaaaatgataaccgtctttcagaagctgctgcagcgacttccccggaatgtagctcatcaccgtatatacttcgccgtcaattgtgaggaaatccagcacctgcggaaggtaggagtgatgcaggttcttcagaatatccacttcctgccggttcacaagcacagacacactccgcgtccgcatctgctttatcacgacttcttttttcagtcttttatgatacgcccggtagacaataccgccgcttccttccccgagtttttctcttatgatatatgtatctgaaaattgttctgcaacactcatttcattcctgccccgcctctaacataaactgaaactcttcatccgacagctgaaagcacatgccgccggcaagtctgaccggctttttgatctcgctgccgtctatataagtatggttggaagagccaagatcttccagataatatccatccgccgacgcggtgatgcgtgcgtggtgccggctcaccgtcggattgtccgtaatgacgcagtccgaatctctctcttttccaatgactgtctcgcgcccggcaagctctgttgtcctgccgtctttcagtctctttatatacgcgcgcggaacgtgcgcggcgaataccgtaggctcgcttcccgtgtacgcacactgctcctcccggacaggaacctgtctctctcccgccggttctatcctttttctgatgataatgtcctcgccaaatccctttttcctaagcggcgggataaacacctcgcccgcctctttccatccatcaagataatccattctaacttcctcctatctgcggtcctttgatattcttttcagcatcacgatactgattcccatgaagagtacggtcataaacgccaggatgccccacgctgtcagcacatgtccctttgtggccttaaaaaagctctccgccgcatgttccagcatcggatagtccttctgaagcttaagatccagccggttcagctttgcgatgcttccaagcccctccaccgaccagcggctgacagtacagtaagatatgatctcaccggctcccttcagcgtgaacaaaatacctgagaacaacagctgaataatgagaacaaagggcgccaccgccatcgctttatctcccgtctccaccatggaagatatgacaaatcccatcgtgacggacgccagtatggtcagccagacggtaaatacgatctccggcccaaacccggacaagaagatgccttctctgtcctttcccacgagctgtaaaaatacaactgtcaaaataagcgcctgtacgaatccgagcgccgcctgcaggacaaactttgacatcacgtatcccggtaatttcagattcgccatatattcccgcttcagtatcacccgctctttgcatatctcctgtatggaattgaacagtccgatccagataccggaacagctcagcgcaaacagcatggacttcgtactctcgtatatcttgaatatatttttatccgccaccacattgagcagtaccgcaatgagcagcggctgcagcaggagcacgccgagcctcggccggtcgtttttcataagctctgcgtaccgcatcgtcaagatggaaaactgccggaacgcggatacacttctctgcttcatcagttcggaccttgctgacggctcttcctttgtctctttgtccttgcggtaagcggcatatcttcgctcccacagccatggattttccgcgatcatgttataaatatttacaaggtcgtccgtctcatagaatgcttttgcggcattgacgccgccgcagaaacagagcctgccgcccggccccataaatatcaccttgtcacagagatgcaggttctgtgtcgtatgtgtgaccatgattatcgtcttattctgctcttttgaaagcgtactgagcgtcatcatcagatttttctcggttcccggatccagccccgaggtcggttcatcgagaaagaacagcttcgggtcggccagcagttcaaccgctatgctggccctctttttctgtccccccgagagcttgcgtatgtacgtaccttcgtgctctttcaagccaaccatggaaaggacctcgtctatccgctctttgatctcctgcccctgtgtatcttcgggcatcttcatctttgccgtataatagagcatcctgcgcagcgtcagattctcataaatgatatcctgctgcggcacgaacccgataatactcttcagattctggaactgttctatgagatcgatgccattacagtacactttgccgtcaaactccggctcgaatccgctcaccgcgttcatgagcgtagtctttcccgcgcctgagccccctatgatagccacaaattcatttccctgtatctcacagctgacattttttaagatctgcttctttttcttcccgcggcccacgtatttattaatgccgcaagccctcagtgagattccctgtgctgtcgccttgtaatagatgcactcgccggaaaagaaaagctggtaatccagtatctggatcaggtccttatctctgagcacggctgctcccgcagcgctgcgtccgtttatcatcactccattcgtgctgtggttatccttcagcacataaccgccgtcctgcggcagaacaaagcagtgcaccttggacaccccgggatgtttcagcctgatctggcacccggacccgcgcccgatgctgatgccttcacccttaagcggcgcctttttccatacctctccctccgggatcaccctgtataacaggagtatcatcttgtccggggcatgtacatccccgatcctcagcaccgtcttgtcatagagctcagtatagccgctgccccctgtgagcagccgccgctgttgcccgtcgccgatgaacgtaccgttcatgctgccgttatcttcgtaccaggtgcgctccccatccaggaaaaatgttccgtgcagtttggacacgatgttatccggtatgacgatatcacactgctcccggctgcgccccagcgtgacattctcttttccaaagctctccagctttacttcggtaagctggctgcctgtatcaataattgtcagtgttctagtttccattttatcctcttctgctctctttcctctgggttccttcttacccggcctcgtcaaccagcgtcatgtccgacacatcgcagaacgggatcaggaacgggttcgtatagtaatccagtcctcccggcacttcccggctggagatctgctcgtatacaacgctgctgtcagcaaccaagacccgggcgatgacctcagtgtccatatgacactggactgccattatgtacggttccccctcttcctccggtccgtacagcgcagtgtgggacccggtgaactcgcctatatacactgccgctcctcctttagccgtatataccttatacgtatagtcagcctccgcgtggccgcacaggacaagaagctcctgtactccgtccctgtctatgtcccagagtgcgtacgtattgtatgttccataatcttcaagcgcctgactgacaacaggctcataggctgccctgtaatccacatcttcagtctcccctgctgcagtatcctgccctttggctttttggtattccccctgctgccagatggtaaactccaggtctatttttccgagttcctccgcggtaaaattattggaatacatgaaatgatcttcattttgccgcctgccggttatggtaaagagaatatcatccatctcatcgtccatggaaagtttcatcatccacgagtctctgatctcagccgctgatatcgtcaggccaatatgttccagccgttccgccatcgcatatgcgtcactttcgctgtcctcaaaagaagagcctcctgtctccccgtccgttccggtatacttctggaatccgccgtcatacgtcagaacaaacgactcaaatccccagccgtctgccagcacatatgcgagaccggaaaagctgccgcatatatagagcttatcatccttttccttcagaaatagcatatcctcctcaaagtctaatgtgccgaagacatttacctgtgggctccactcgtcgcttttcacaattgtgccattctcattttcatacatttgtaaagatatcttattctcctgagaaccgtcccattcatttaccgccttattgtccagtataaccaccagcagttctgcctccccgtcggagtcaaaatccatgatccggtatgtgaccactcccgcctcactgtgtatactttccacgcgcgcgccgtacgtacttacctttctgtattctgtcgtataggtgcccgggctgcactgcccaagttccgggataagcacctcatccacgtacgtatacaggctgtatttattctttatcacagcgctccccgtattctttaccccctgcttgagaatctccctcgccttttccggttcattcgttttctcatatatgcgggccagctgtatatacggctcctcctgtttcccgtctatgctgatcgctttcagatagctgtcctttgcgttgtcatagtccagttcttccatatacttgtctgccttcgccacattgtcgccgaactgcttttcattattctgctttgctgccgtaaacagtgcggccgcagcagcggctgccagaacacagatggccaggcacacccacaacactttcttctttttcccgccgttagacttacccccgctttccgccgaagattccgttaccggcgcgccgcatttacagcaaaatctgctgccggcctcattctcggctccgcattttctgcaatacatgccgttccctcttttcttccaattttttacatatattcttttatgattatatcatttttttagaatgcatttcaccatttttgcataaaatacaataaatatgccatttttagttttttgtttgtcctcgacgggttttgactcgttttaccacagccgtgtgctatgattactccatgaaagaatctttattcataagggggtataataatgggaaacgcattagaacagttgagacgcgagacaaaagatgacgcaaaactatatggctgtatcaaagaattgtacgagcagggggtgcctttttcagatctgaaggccttgatcccggacatccgccgtaccagggaacagttgtacatgaaacgcatgctggaaaacaacaatgaggtacttatgtccatgttcagcaaagagatgtccttccttctcgatgcaaaggagcgccaggaggatgaacaatttaaaaaactggaccagctcatccgccagcagcaatcttaccggaaagctgcagcgggaaccggcccagtggaaaagctgaaaaaattattcctgcctgcttaggttggcgaactttgtgtactcgccaagccaagccagatgaacggtccctacagggccgtttctttgttttgcaataatgatctctgcctgtttcttatattctgaatctttgttatagtattcatctctgtatataaacataaccacgtcggcgtcctgctcaatggcccccgactcacgcaggtcagaaagcatgggccttttatccggcctgctctctacggcacggcttagctgggacagcgcgatcaccggaacactcagctctcttgcgagcgccttgagggaacgcgatatctcggatatttcctgctgccttgattcggagctcttaccgacgcttccggtcatgagctgcaggtagtcgatgatgacgatatcaaggccatgttccagcttatacttccggcatttggaacgcagctctgacaccgagataccgggggtgtcgtctatgatcaagttggactggccgatgatgcccgccccctctataagcttctcccagtcggagtctttcatattacctgtacggagcgcctgggcatccacctgtgactcaagagaaaacagacggttcacaagctgctcctttgacatttccagactgaagatcgccacgcccttatctttcttgaacgcgatgtactgtgcgatattaaggacaaatgccgtcttacccatggagggccttgccgccacaagcaccaggtccgacggctggaggcctgagagcttgtaatccagatctataaacccggtcgggatccccgtgacagtccctttgttcttggacgccttctcaatgcggtccagcgcgttcagcacgacgtccttgatcgggacataatctcccgtgtttcgcctctgcagcagatcaaacactgatttctccgttgtctcaagcaccgactcaagcggctcttttccggcgtaacatatgttggcgatctcttcattgagcttgatcagcttccgcatcatggacttgtcggacacaatatccgcataatacttaacgttggcagacgtaggaacggcggtcacaagatccttgacaaattccaggcttgcgatctccgcaggcacatctttttccttcagccgctcctgaagcgtgatcagatccaccggcttgccttcgttaaaaagctctaccatggaatcaaatatcacgccgtaagcagactggtaaaaatcttttccgctgatgatctcagacgcggtcatgatggcgtccttatccatcagcatggcgcctacgaccgactgttccgcttccacgctatggggcatgactcttttaatgagcgcctcttccataccgcactcctcctatacttcttccgtaacaacaactttcagttctgctgtcaccttcggatgcagtttgatcggaacattatgtgtcccgagcgtcttgatcgtctctttgagctgtacctttttcttatcgatctccagacccatctgtgccttcacctctgcggagatctccttggaggacacggctccgaacgccttgccgccctccccgactttgatggacacttttatgcttccttcttcgatcctggcgccaagctctttggcagcctcatactgctcctgggcaaccttatcggcatttgccttcttaagctttaagtcgttcaggttcttgctgttggcttccaccccttttttattcttaaggataaagttcctggcgtagccgtcgctcacctccacgatatctccctttttcccgagtgatttcacgtcttcatttaatattaccttcatcttagatgtctcctccttctaccatgtcatgtattacttcctgaagcttctccaccgcctggtccatatttacatccagaagctgcgcgcccgccgcgttcatatgtccgccgccgccgagacgctccataatgatctgcacattcacttcgtcgatggaccttgcgcttatatagatcttgccgttgtactctgtcagcacgaaggacgccttgatctggcttatatccagcagctcattggccgcctgggcgcctatgatcgtcggactttctatggcaagccccgtgccccgcgcgatggcgaacttatcctcatatacttccgcgctgctgatgatctcagcctttgcccggtacgcatccatgtcgtcccggaacatcttgcgcacaagcgtgatgtccgcgccgcaccggcgcagaaatgccgcggcttcaaacgtacgcaccccggtccggttcatgaaattgttcgtgtcgatcataatgcccgcatacaggctgctcgcctcgatattgggtatcttgatatcatctacgatatactgcagaacctccgcgaccatctcacacgcagaagacgcgtacggctcaatgtatgacagcagtgcattgtcaatattatcgctgctctgtctgtggtgatccagcacgacgatcgtgcgtgtcatgcggagcagttcctcacactctgtcatctgcggccggttcgtatccacgacaacgaccatcgtgtccgcgtccgccatgtcgatggcctgctgtgaattcaaaaacaggtcctccggataggcagggtcgtttgcgtatacttcatacagcgggcgaagcgaagcggacacctcatttatgataatgtgcgccttcttttcaagagcggccgccgccctgtatattccaaccgccgcgccgaaggaatctacgtctgtcagcttatgccccataacgagaatgtgttcctttacggtgataaactctctgagcgcttccgcttttaccctcgctttcactcttgtgttcttggacgtctgctcccgcttgcctccatagtaagtgataccgctgcagtcctttatcaccgcctggtcgcctccgcgggcgagcgcaaggtcaatggcgacgcgggcatagttatagctctgcgagtacgccgaattgctgagtccaagtccgatgctgagcgtagcggggatcccgtttccgatgttgaccgacttcacatcctcaagcagtgaaaatttatcctgttccagctttttaaaatactgcttcttgatcgctataaaatatttatcattttccagcttcttgacaatgccgtccactctggcaatatactggttgatcttacggtcaacgagcgccatcaaaagagactggcgcacctcttccacgctgttgatcacttcgtcataattgtcaatatatatgagtcccgcaacgagacgctgttcttcattttctttcttacatacgttcagttccgtcacatcgttgagatatacggcgataaagtattcccgctcctccgggagctccatcagctgttctgtctcactgaagcctgccaccgacacgcgccggagcaccgccttatattcccggttttcgtagtagacatccatctccacgatctcatcttcttcttttgggaatatgttcttgttcagctcagggatgtacttacttacataagcctcccctttcggctttcttccgaatatctcttcaaacttgtcgttcatccatatcgccttgccgtcctccagaaggatcgcatacggaacagacagttcccgaagcagcgtattctgcacgataccgtactgagcggcaaattcaacgagatctttcataatgacagacttgctgtacagatacaatatacctaccatcacaatataaatgagcaggaatatgaacatcaatgtccccgcgcgcctgtccagcttgtatatccatatgttcacggccacaagaaacagcgccatgatggccggccattgcatatacagtctcagctggcccttcagctggactttcttattctctttcatatctccatcctctaatctgacctataacagtcacagtctctttctaaacagagccacacaatatacgtcaatattataacatctttcccggagaaaggaaaggacttgtatcttttcggtaaaactgtataattataacactactcaattatgtaaaacagcctctcttttatttgcacaaaaagagaggcaggcgcacataaaagaaactataataaagcatgggaaaaggagaaggcatgtatggaatggatagaacgtctcaacaaagcggtgaattatattgaagaaaatattacggaggagcttgattacgcgcaggcagccagaacggcctgctgctccacctatcatttccagaggatgttcgcctttatggcgggcgtcccgctttccgaatatatacgccgcagacggatgacgctggcggccgcggacctgcagaataaaggggcaaaggtcctggatatcgctttaaagtacggctatgcttcccctacagcctttaaccgggcgtttcagagcatacacgggatcacgccgtcgtccgcaaaaaaggaaggcgcagtgcttaaatcatttccgcccataagttttcaaataacgatcaaaggagtggaagaaatgaattacagaatcgaagcaaaggaatctttccgcatcatcggtatatcggagcctcttcacaaagatatcgaagagaacttcgccgttgtcccgggactctggcagaaggcggccgcggacggcacgatcggagctctcgcaaaaatgatgaacggccagccgatggggctgttaggtgtcagcgcctgccacgacgaagatgagtggcggtactatctggcagtgtcaagcgatatggagcttaccggcagtctggaggaatactatgttccggccgccacctgggccatcttcaccggttcagggacaaaccgttccatccaggaactggaacagcggatcgtcacagaatggctgccgggctccggatatgaatatgccgacgcaccagatattgaagtatacctgaacgcggatccggataacgcgcagtatgaagtatggataccggtgagacagaaggactgaccggacataaaccggcgtcctgcccgcctcttatgtaaatgaaaacagcagatacagaaccgtctgccgtttacgcggctttcccttctgtatctgctgtttttttcgcttatcccggaattattctacatttctgtgccttgcttccatctgtgcatgtgtgagctgcatctcttcttccagctgtatgatgataatatcgaacaaaagaaacagatgctgttcaaataagttgcccatcggctgtacggagggcaccgccctgtcatccgtgccgttatagacgcacgccggaacaaacagtacacagtccgcaagagccggtgtcttttcttttggcccccctgtgacgaccgcgacagccgcgccgctttctttcgcccgctctgtcacatagtgaatatgtcctatttttcccgaaccgttgacggcgatgaataaatctccggccgccatgcctggcgtcgtatcatcccagatccaatgtacttcttttccaagatgcatcagccgcatggcaaacgcccgcgcggcaatgccttctctgccgacgcccataagaaaaacgcgcccggccgcttttatatgttccatgaactgctgtaattctgtcagatcctgtttttcaaataccttttcgtgttccagaagtatcgtcttatacaattccttatatttctcttcgttcacttctaacacccctctttcagactttttctaagttctgtcatattggtatacttttttaacgcgtaattcagaccgagcacaagtacgagcatgatcccccagatcaatttcttcgtgtaaggggacaatgacataattgtaaaagcgctggataagatctgcatcagtatgactgcgatcagcactccgcccactctgcccttgccgccgtttggatcgatgcctccgaccacacatacgatcagcgtctggagcagataagaatcaccataccccactttggcggaattgactctgctgagtacgatcaggcccgccatccccgcgagaacgcctgtcaaaagaaaggtacagatgcacatcttatcattatctatggccgagaatctggaagccgtaggattatctccatacagatatagttttcttccaaacttgctttttgacatgaccatgcccaggatcactgccgccgccagaaacagccagaaaataagggggatctgtatcagtgttgccttgcccatctgcgcaaatcccttatcaatgttcccgacactcgctcctcctgtcactgccatcccgataccctggaacaatgtcatcgtgcccagtgtcgctatgagcggaggggccgaagtcctggatatgagcactccgttcagcagaccgaacagaaggcttacgatcactgcggctatgaccgcggccgcgatccttgccggtcctgtcagcccaaacgcccattgtccgttgagaatatatgcgctcatgatggcaactgtatttgcattggcgataatggacagatcgattcctccgatcatattggacaacatcatcgccaaagccaaaaatccaaattccgggatctggaacgtcatagactgtatatttttcagagagtacattgcgtccccgaaggataccgccgaccacagcagcacaagaacggtcactcctgtaagaatactgagatttagatctctgcggatcattttatttactttattcatcttctgcctccctattctgtaaagataaggttatttcgattcttcaccttttcctgatatgatgtcacagctactgagatgaccagaatagtccctacaaacagattgttccacgaggatgacagaccgatcatgatcagcgttgtatttagaagatagataatgatcacgccgaggacggctccaaatatttttccctgccctcccgtgatctttgtcccgccgatcacaaccgcggccactacgatcagttcatcgccgacgagcttattcggatacagggcatttgtctgtgccacatacatcatgcccatgatcccggccaggatccccgaatagacatacacaaacagcctgattctaaacgggttgaatccagcccttctggcggactcttcatcatttccgaccgcaaatatccctcttccgaccattgtcctgtataaaacaaaccaggtcacaaggccggccagcagtaccgggatcacagaagctgtcagccccacatcttttatcttaaatacagaagcctgtccaaaggaatgcagactttccggaagcacgcccgcgccaaaagacttatcgctgataaatgttgtcataattccatggaacagattctgagttccaagtgtaatgataaatggcggcagcttaagccagctgatgagcagagcgttgataactcccagtatgccgccgataagcgcagagctgaaaaaagcgaatgccagattgtctattccggttccgatcataatgtttatcgtcgtgtagcttccaaacagggcaactgccataaacgatacgtcgatccctcccgagatcatcactacgagaaggccgatggcaaccatcagcgtagtcgacgcgacacgggtaatatcaaaaatagtttctatatgtatgaacgccggattcttgaccgcgacaaaaacactgtacaaaataattatcagcaggagaatcccctgaaaccggtctaatttccttatcttcataacgctcccccctttgcggtctcctctgcatgccgtccgataagttctgttatcgtctgctccgcattttcttttaagtcttcctcttccagcatccgtacgcatctgccgtctgcaaggatcattacccggttgcagtttgcgataatttcctgtatctcatcagaaataaagataattgacattccggacgccgcaagcttatgtatctgttcgtatatttctgcctttgaaccgatgtcgatcccaaccgtaggagtatccatgataaagaccctcggcttagccgcagtccacttccctatcacaaccttctgctgattccctcccgacaacgttccaactgcggtttcaacagaaggcgtcctcaccttcagctgacgcgtgtaatcttctgcgacttttttctctctgtttttatcgagaagtcctttcccggagatgtcatctacgatcgcagatgatatattttccttcacctctctgtccatgaacagtccctgacgaaaacggtcctccggaagcagagcaatgcccagttttttggcggccatcggcgacgatatggcagcttcttttccgtctattttgatccgtccgctgtctgcgggattcagtccaaacagcgataacgcaagttccgttctcccggaaccaagaagcccggttacccccacgatgtccccggagcgtacggtaagagaaagcgactcgtactgtccttttctcgtgagatcttcgatctccagaaccggtgtgtcatctttgacagaacgccggtaccgcgggtattccacttccctccctgtcatatgataagatagacttttcttatccagctctttgctctcaaagtcaccgatcttttccccatttcggaaaatcgtaatagtgtctgccactgaaaatacttcgtccagcttatggctgataaaaatgaccgccagtcccttcttcttaagatccagcattattttcatcagcctgtcgacttccgtcttcgtaagcgcggtcgttggttcatccataaaaagaattctggcatcctgcgcaagcgctctgcatattgcggtgatctgcctgtttgccattgatatctctcctaccggctgatcgatatccatccggacgccgatcttatcaagctgctctcctgcgatctcacgtaccttcttccagtttacgatacgcttcctgtcagacttaaatctgctgatcgctatattttctgccactgtcagatgttgaaacagcgataaatcctgatatatcacctgtattccttccttcattgcctgcgccggcgtcaggcaatgatacaggctgccgtttaaaacaacttctcctgagtcaggcgtatatacgcctgagatgttttttacaaatgtcgatttgccgcatccgttctctccggcaaggcagtggatctttccgctttcgatcttaatattgatatccttcagcgcctgaacaccgacaaatgacttgtatatatgtctggcttctaagactgttcccataatgctacctccaagcgtgtgtctcataaagctgctgcccgatcagcataatcgggcagcagttttgattctgtctagaaattgtaatcattgatattatcggatgagaattcaagaggcgcattcccataggcaactccgtcttttacttccatctcttcgtaaccggtgatcttaaggtcggttcctgtctctactttctgccctgatgccagcaggtacgcggcgtagcatgttgcatatcccgcgtcggccggtctccatgccagccctgcggccatagagccgtcttccagatacgtagcggacatagacggcagcgccagagatacaacttttatatcatctgtcttgttcttttcctgcagcgtctcacaaataccgcctccctgtgcggaacagtcaaagaatcccttgatatccggatacgccttcaggatctccaatgccttatcatgggctccgtctatgctgtttccatcttcataaggttctttagagacacattccatatccgggtagttctcttcaatataggcaaccgccgccttataccacgccatatgtgtctccatcgtcaggccgcctacaaaaccggcatattttccttttccccccatggccgaagcaagtttttctccaaacagctgtccgaactcttcatttacaaacgcctctacatccagatccacatcaccggcaatgcccggcgcctcatgtgtgactaccacaatgcccgattctcttgctttttcgatcgtcggcacaagtgcctccggatcatttggaactacgcagatcgcatctaccccctgcgcgatcagatcttccataatagagatctgacttgcggcatctcccgtctccggaacttgaacagagacattcagtcctgtatcttttttcagctgttctacgcccgtagccatgtcgtcaaaccatgaatcgctctgcttcacgaccataacaacctgatactcctcaggatctgctgtcttttcctcacctgtctcttttgtctcctttgttttcttgtccccggttcccgagcccgcatcgctgctcccacatcctgtcaccattgcggcagcaagcataatacacaataatactgaaaccaattttttcatcttcattcctccttacatttgttttcttttacataagcacattatagaggctttatttttaatatgatataaacatttccgtcttatttttccaaaattccgctctatttgtttcaggcctttttccgcgggcaaatatacactataataagtattgttagcagacagacatggagatatttacaatgaaaactaaaaaaacaatgatgaccagaatcgcaaatctgcagctggggactaaaatcgtaggcattcttctgatcgtgatactgcttatgatctcttcctctattgcaggtatcacaatggtattacattcgagcaacaagctgctgtaccaggctcttgccggttcattaacttacagtgcggaggatatttccagaaaaatatccaatattgaatctatgacgagcgccatcgtctcgaattcaaatatacgaaagaacctgatcactttaaatgatgaggagtcaatgatccgtaccggtaatgcaaaaagctcactggaaacgctgcttgcagattattaccagacatacaagaacaacaacatcagctatatcaacctgtactattccggcggggtcgtgcaaagttatgaagcccaaagctcctccgtgcctgaacaggttcacagggaagttatcgccgccgccaataatgtatcgggatatccgtgcgccgtcacagactactgtaactcctacggactttttctaggccgtgactcacggagggtggaacagatgaattttcacaggctgggtactgtcgttgtatgtgtggacatgaaccggctgatccgctcttcgaccagttctgttcttccatcggaagagacacagtacgttctgatggataacggtacggaattctaccattccgacggtataggctcagaacagcttaaagatatcaacaggcggctgcgctcggattacggagttgtaacggtcgattcaaacaggtattttgctgttcagggaacgataaagaacacttcctgggaatacatctgtctcgtcccctatgaccacatctttgcggcgctgagcttcactatggtgctggcactggctatcatcctcatatcggtgctcattgcgatcctgctctccagaatgctgatccgttctgtaacagaggatttccggcgccttgtaaataaaatgaaggccttcgggaaagacgagtcaaaagcgccggatatcggctatgactacagcggcagaatcgatgagattggtgttcttcacaatcagtttgaccagatgaccataaagatacaggacttgatccaacaaaactatgtcaatgagatcctttccaaagacgccaggctgaaagcactggaaaatcagatcaacccacatttcctttataatacgctggaagcggtgaactggcgtgcgaaagcgatcggtgaaaaaaatatatcctccatggtggagtcgcttggcactctgctgcgtgaaactttaagttccggttcaaagaactttactctaagccacgaattagaaattgtacagtgttacctgacgatccagcgtatccgttttgaggacaggctgacttactcccagaacatagatcccgccatactgtctgtcacactgcctcactttacgattcagccgctcgtagaaaattctgtcaattatgcaatggaaaagagtacggaagtgtgtcatatatggctggaaggttcccgccataaagacacgatcgtgatagatgtgatcaacaacggttctcagtttgagaatgatctgcttgaaaaacttgaaaacggcctgatcaccccgcacggatttgggatcgggcttctgaatatccacaaacgtatccagctgacttatgggaccggttatggtcttactctctttaacaaagatgaagaacatgcagtcgcaagaatcataataccgggaggaacatatgctgaaagtattgatcgtagatgatgaaaaaataatacgggagactatagcggacctgatcgactgggacgccctttctcttcagctcatcggtacggcaaaagacggaatcgaagcttacaatatcattctggacgaataccctgaaatcgttctcacagatattaaaatgcccgggctttcaggccttgaccttattcagcgtatacacgcggtcaacaaagacacacaatttataattctttccgggtatggtgaatttgaatatgccaaaaaagccatgcagtatggtgtcagacattatctgctgaagccttgcaatgaagagcagatagtagacagcctgaaagatgtaaggaaagattatgctgattaccttacatccaaagataccccgccgcagagctttatcgcaagaaatatgaatctgaacctgatggtgggaatcatgaacgacagcctcagtccggagacagataaagaattttcttatattttttcaaactataagcgttatctagattttgataatgttccttatgagatattttatatttactttgttacgccggaaagctatccgttattactggagaagctccagcaattccgcgatgatatctgcccgggtatcgcgttcaacatcatttatgtatataacactttgatattcttctttaagtcggtaaacaacgacctgggaaagatatataactttctggatacggtagtattagaccagtccgttaccattaaatacaggcacgatcactgcccgaacctttccgctatgctgaaagagcttatcccccacataaaaaaatatgagatcatatattttacagagggcagcaatactctttccatatataattatcagaatatcatcaaggaagtacagcggcttacagcctctatatattctcctgaaaaagcatcctccggacaggcatttctggagcttagaagtacgctgtcttcgctttccgacgctgactttttaaagcagcttgcctcctcggtcattatcttttccgtcgcaagactccgttcatttgatatggtagacgccgccgagtttctcataaagctggaaaaagaaaaagactgccgcgagatctccaacctgttagatgaccagcttacatgcttttttgaagaataccactcacagaaatataccggcgatatcagccataagatacaggagtacgtagaatcgcatatttgtgattcaggactgtctctgaaatggatcgcagaaaactatctgtttatgaatgttgattatctgagcaaaagattcttaaaagagacaggctgtaaattttccagatatctgaccgacatgagaataaaacgggcaaaagaaattctcgcttcctccgaccttgactccatccagaacgtggcagatatggtcggctgcggaaataatccacaatatttcagtcagatattcaagaaatccaccggaatgtcgccaagcaaatatatgaagatgctccacggtgacgccgaatactaaaaggagacagcctgcctgccgcagtaaactgtctccccatattctctgatgttctaactgttatatccgttcgggttctgtgactgccatctccatgtgtcttcacacatctcgtccagccctctctccgccttccatccaagcactttagctgctttcgccgggtccgcataacacatggcgatatcgccttcccgtctcggcttgatctcatacgggatctcttgcccgctcgcttttccgaacgcttttgccatatcaagcaccgaatacccgacacctgttcccagattgatgatatcaagtcccgggttggtgagaatataatcgatcgccttcacatgaccgatcgccaggtccaccacgtggatatagtcacgcactccggttccgtccggtgtgtcgtaatcgtccccgaagacgcccagcttctcaagcttgccgacagctacctgtgagatataaggcatcagattgttcggaatgcctttcgggtcttcaccgatgcggccgctcttgtgggctcctaccggattgaagtagcgcagaaggatcacattccagtcgggatccgccttctgtacgtccgtcatgatctgttccatcattgatttcgtccatccataaggattcgtgcactgtcctttcgggcagtcctccgtgatcggtatgatctccgggtttccatacaccgttgcggacgagctgaacacaatgttcttcaccccgaccttccgcataactttcatgaggctcagtgtacccgtgatattattctgatagtattcaagtggcttctgcaccgattccccgaccgctttcaatgccgcgcagtggaggaccgcgtctgccttctcttcctcgaacattttctccagagccgcttcatcgagaacatcaccttcataaaatgttatttcttttccggtcagttcttccactcttcttatggactctctggaagaattgctcaggttgtcatagacaactacctcgtaaccttcattcagcagttccagcgccgtatgacttcctatgtagcctgcgccgcctgttatcaatatttttgccatatttctgcctcctagctgttgctgtacttgttaacgatgtcctgcatagtataccacttctgctccatatcttcaaccagcttaaactgtgtgcggcatctgtccaggttgtgcttctccctgtggatcttgaaatatgtgtccccctgcagatagtctgtcaggaacctcataccgcactcgtatgtcatcgtctttgctcccataggcatcagctctatctcacgctttgtcagttttccgccgcagccttcaatgtaaccttttgcatacaattcaaaaagctccatgctgcaggagaccttgtcgagattctgctcatcttccgcggccgtactggcgccaaagcggatagaatccccaaaatcatgcatggccagtcccggcataactgtatccaggtcaatgacacagatccctctgccggtcttgttgtcgatcataatgttattaagcttcgtatcgttgtgtgttacgcgaagaggcagttctcctctgtcgagcagatcacagaaataatctgcggtctcctcccggtcgagcacaaattgtatctctttttgcacggacgcggcgcggcccatcacatcttcttccaccacctgcttaaatgtggcaaatctggcctttgtattgtggaacccttttatcgtctcatgcagcgtctctgcgggataatctgccagcagccgctgaaagttgccgaacgccaccgcgctctggtagaaatgctccggtttttccacctggtcatagctcgttgcatctgtgataaacttgtaggagcgccagtaatcgccttttgaatcaagataatacggctttccgtccaccgtaggtatcacgttgagcgtctccctctccgggtcgccgccgttctctatgatccgtgctctcaggtaagacgtgaccccgagaatattctccatgagctctaccggtttctcgaacacatccttattcatcctctggagaataactttgatctgtcccatctccgctatgtcaaatacaagaaggaacgtatcattgatatggccgcttccgtaagggcattcctctacgagcatcccttcgtactggaaatgcgcgatcacctcatcgcgctgttctctcgttacctgtgacattacgcttcctcccaaagatgcgccggatacagaccatcctctttcatcttttttatggccgacataacgaccggcttatcctctttataagtaacaccgtaccatttatccgcagatttcagcacagcgaccgtcgctctgtcctcgccgagcagatcacttacgaccgccggcaggaaatattcacatttcatcggatttttcttcagtccctcattaagaaatgccggaaatcctgcctttatctcatccagtatgcttctcgtgaatccccacatgttcatggacacggtcgtatccgcgggcacgctcacccacgttgcaccgtcgtcctctgtataggctatgccgccgtcccgcttctcaatgcgggtcctctcatgaatggcgatcagctcaccctctttgttcatgtcgcacacaccgcgcgccacatgcccgttatctgtcaccgtattgccaagctcgtatccaaccattgtataacggtatttatcgtcatcttcatgagacgcaagataatcatagataagccggaatgcctcctgaccgtaatagtcgtctgcattgatgacagcaaacggtccgtctatctggtcgatgcagcttaagaccgcgtgagccgtcccccatggttttacgcgtccttccggaacctggcagccgtccgggatattatcgatctcctggaacgcgtacgacacttccatatatttctccatgcggtcgcccacggctgctctgaaatcagcctcattttccctcttaatgataaagataaccttttcaaatccggctctttttgcatcaaacatggaaaaatccatgataatatgtccttcttcgtctactgggtctatctgttttaatccaccatagcggctgcccattcctgccgccatgatgaccaataccggtttattcattgtctttcctccaagctctattattaatcaacagcaaccactagcctttgataccaccggtaacaccgccgatgatcttctctgacaggaagatgtaaaggataaatgtcggcaggaacacgatgacaacagccgcaaacatacctgaccagttgcctgtatactgcatggactgaagcattccgtaaagtccgacggcaacaggacgaagagcgtcgctgtttgcaaagatgagggacaggaaatactcgttccatatattgatgaagttgaaaattgtgaccgtcacgattcctgactgcgccatcgggaacatgatcttccagaatgtctttgtcggaggacatccgtcgatagccgccgcttcctcatatgtacgcgagaggttcgcaaaaaacgtcagcaggaatatggtcgtatatggtatgttgatacctatgtacagaaacatcagcgtcgccttgctcgccacaatattgttcaggatccccatgtttgcgacaatacagaacagcggaagtacgatcatcgtgatcggcacgcccatcgccgacacaaaccctgtctggatgatcttgtttccgaggaacgtaaatctggccagaacgtatgccgccggcgcgcagatcaatatgagcagcacacaggagacgatagagtacatgagagagttcatgaagaatgtagcgacaccgccggacccccaggcctcgacgtaattctcaaaatgaagccctgacgggaacttcagcgccttacccgcaaatatatctccggtggtggacagactggccgcgatgatccagccgagcagcatcagggtaaatactacccacaaaatgatgacgatatagcccggagccagctttgcttcttttttccagttgattttttctctaactttcttttctttattcttagacatgaccgctcctccttcctagaattccagatcgtcatctttgatgaacttgttgcataccgtaaatacaagaactacgcacagacacaaaatgataccgatcgctgcgccgtaacctgcgttacgctctgtcaccgcattaccggcgccgaagatctgcatgtacatgtactgtaccggcacgatggtggaacggttggctgtaacggacgaaaacagctgggaccagacgaagaacgccgccgtacttacggtccacattgtgatatttgtcttaaatacacccttcagaagcggcagtgtcatgaagcggaactgctgcggcttgttggcgccgtcaatggtggctgcctcatacagatccgggctgattctttcgataccgctcatccagataagcatatgatacccgatcataccgaagcagtaagcaagcagcagcgcccagaatacattttccggggcggtccactgtgtctcagcaagcttatgcagtccgagtgcgtcgagcacacttttcagaagaccgaacttcgggctgtatacgtactgaagccacattgtggcaagcgcaacggcacttacgatattcggcagatagataatggccctgaaaaatttctttcctctgataccgctcgtaaggatgactccaaaaagcagtgagacgatcattacgatgatgccgccgataagccatatctttacaatatttgtcatggccgtcttaaaaatcgctgtagtaaaaagcttctggtaattctgtacccctacgaatgtccataagtccatggtgtctgtcacggcttcgatcttatacagactcatcattactgtacggacgatcggatacaggaatacaatgagaaatataatgacggccggtgcgaggaaccccacgatcattcctttatttttcttcatcagacaacctccttgtcttaaaaaatatggtggcggcgtatgacgccatgccaccatatatatattacctatttacttctgttcttgtcaactgcgcacagactattgtcctgatgcgtccttgcaagatttgataaattcatctgctgtcatgcttcctgccatcagtttcacaacgttttcgttgaggaccggtgtgaggtctccgttgttttctgctccaacagcccagtcatagtatgttgttgtagcatcaaagcctggttttacttctgtcagctcttccggccatgcatctgagttagcctggtctgccgggatacagagtgcgtcggttgtcatctgcttgtcagcatcgcctgctgtgatataagtgatgagctcgaacgcttcttttgtcatcttggaatctttgttgatagccattacctggtttgcaatgttgtttgcagtgctgtcatcttttccgtccttaacagccgggtagttgaagtatccccatgtcaggtcgtctgctacttctaccttgtcttcgccttctgcgttctctccaactttgatctcattcggcagccatgaaccgcacagaatgatcgcagcttcaccaggagcaaattcctgattctgtcctgctgggtaaatgttggaagctatgttcttagagaagtatccctttgctgcgaaatcttcgatgtcttttgcagcctgaactactttctcgtcatcccatgttactttgtcgatatcgcctgattcaaccttgtctgcaacagccggatctccaacgagagccttcacgccgtcctgtccaaggtaacgtccaagatgatatcccatgaaagatgtcatatatgtagtatcgcctgtgatcggtgtaacaccggcatcttttaatttggcacaagctgcgtctaactcttcccatgttgtaggaactgcttcgataccagctttgtcaaacaatgtcttgttgtagaagaacccgaagatcgacggctgataaggaatggagtgcagtgtctcgtcaccgtcgttgttctgtgcatatgcgttgcgggcgatcttgtacaatgtctcgttgccgtgctcagcttcaaagtcttttgcaaggtcttccaggtcaagcagatattttccccaggaaccatttacacggttaacatcttcgtcaaacaggtcgatctgctgttttgcgtccagcgccggctgcagaccttcacgctgtccgttacggcctttaaactgtacatcaacttctacgcctgtatcttttgtgtacttttcaattgcggatttgatcaccttagcctgcggctctccttcactccacattgcccagtaaacaagtttctttccgcctttgtctcccccatcgccgtcagacttctttccacagccgacaaccatggcagcgatcattgttacgcacaataatacgcttaaaactctttttttcataatactttacctcctataaagattactttgtatctgagttcattgtattacaaacatgcacaaaaatctttgtcctaaaatcctcttaatttgcactatctgcatttttgttttgatttttcacaaaacaagaggtataatattagtaagaatagacaaaattctacatcatttattttacaaaacagacaaaacagggggattattatgggatataacggagttgtgctgaaagactctataaccatcggtaaaatttacagtatccactactttgaatatatgagtgatttttcatttgagggggagtctcatgacttctgggaatttatctgcgtggacaaaggtgaggtcggcgtgacgggaggaagctccttcacagtgctgaagaaaggtgatgtggctttccaccagccgaatgaatttcacaatgtaaaggcgaccggcgactccgcaccgaatctcgtcgtagtgtcttttcaatgccgcagcgaggccatgcgcttttttaagaaacgcattctgaggatcgacgagacagagcgcaacctgctcgcttctatcataattgaggcccgccggtgctttgactgccgccttgacgacccttatctgcagaacatgccgcagaaggagcctgacatgttcggggcggaacagctcatccggctttttgtggagcagtttctcatacatataatacgaagatattccaatccgatcatcttcaacaagaaacttcccaagaccgcgccgcagaagacgacaaagaacagaagcgacaacgagatatttaaccgcgtcgtcgattatctcgagagcaatatcggttcccatgtcaccattgaccagatctgccgcgacaacctgatcgggcgttcgcagctgcagaagatttttaaggagaggagttctcttggcatcattgagtatttttctcagatgaaaatagatgcagccaaggaaatgatccggacaaaccgcatgaactttacacaggtctccgaacaccttggctacacttctattcattatttttcaagacagttcaagaaggtcacaggaatgacgccgtccgagtacgcctcctctataaaggcgatggccgaaggcagcttctagcccgggctgctgccggcgatcactgcattgccgaagtattccggcagatgaaagcttggcacgtccgtctctatcatggaccaggaggcataatgctcgatctctgccgcctctgaaattttgtaaaagttgcatgtaaatgtgcttccggcctccagacagagggggccgtatatatgctccagaacagagaggggaatgtaaagcgccgcgctccaccggtcctcttctatctgtgcgctgcacgcaaactcctcatgttcttctctggtaaagtaggtgcggtatatgcgttctttcccgtatgccgccagcagggctccgtttgcgttcacctcaaaattcagatacgtcggctggatgttcctctcccgctcagattcaaattgaaaaaaggcttccatggcgctgtctcggtatacaggtgcattgatttccgtatatttccgaaggggatctgtttcctcacataccatcttcagacagaacccgctgtccggtataaatccgagatatccgtatgttaccggcgccgtctttgttccccatagtttattgtccaccttaaaaggggacaatgtttccaactctttcgcactctgaatcactttgacttccatagacttcatagacatagacaatcctgcagctccttttccatatacatattcaattgttcatatttacatgctgtttctctgcattaaatgtagcagaccgcattatgaaaaacaagattgtacaaatgatatgacacaaatgtgcaaaaaaaacagacgatcgtgctattgtaatcttacctgttattccatatactcaaatataaatagagcgcgcacggtcactgtcgttctgcgcgccttgaatcagggaggttaattatgtctaaaacaaagggcagagtcactctgccaagtgagtctcatttcttaaaggaaacccgggagatgctcgaccgctggggggccgacgcactgcgcgacagcgacgggacaaaattggatgacgagatcaaatctttagatgcaaaaatatatacaacatactttgtcgcaagaggccacaatgaatttgccgaaaaacatatggatgaatgtcagcagatgctgctcatgtccaaacacaaccttgcgttagacactacggtaacgatcgatttcctggacggatatttccgcgagcaggtacaggccgattatgtccacgacccgaaaaaatggtgggaggtcatcgaccgcacaacgcaggagatcgttccggcagacagctggtctgtcgatacagacaggcatcttgtgactgtcacagacgcggtcccgttccacgagtatacagtatctttctttgtgtacgccatctgggatccgacgcagatgtacaatcacatcacgaacaactggggagacaagccgcacgacataccgtttgatgtgcgccagcccgcctccggcgcattcgccagagattatctgaagcagtggcttgcagacaatccggatacggatgtggtgagatttaccacctttttctatcattttacgctcgtcttcaatgccgatgccaaagagaagtttgtagactggtttggctacggggcgaccgtctccatccgcgcgctggaagaatttgaacaggaatacggttatgcgctgcgcccggaggacattgtggacaatggatattacaacactaccttccgcgttcccacaaaggcttaccgggattatatggaatttatccagaagtttgttgccagaaaggcgaaggaactcgtcgacctcgtgcatgacgccggcagggaagccatgatgttcctcggtgacaactggatcggaactgagccttacggaccgtattttgaaagcatcggtctggacgccgtagtgggaagtgtcggcggcggcgcgacgctgcgccttatctccgatatcccgggggtaaaatatacagaaggacgttttcttccttacttcttcccggataccttctacgaggggaacgacccgtgcgtggaagccatcgacaactggctcagtgcaagacgcgcgcttatgagaaacccggtagacaggatcggctacggcggttatctgagtcttgcctacaagttcccgaaatttgtcgattacatcgaaaaagtcacagatgagttccggcttatctatgacaatgtaaagggaaagaaaccttactgcggacttaaagtcgcaatacttaactcgtggggaggcttgcgttcctggcagtcttacatggtcgcccatgccctctggtacaagcagacttactcttacttcggtattctggagtccttaagcggcgccgccgtggacgtggtgttcatgagctttgacgatataaggaacaacggcattccagaggacattgacgtcatcatcaacgcaggcgatgcgggaactgcattctccggtggtgaagaatggctcgacgagaagcttatcaccaccgtgcgcaggtggatacacgaaggcggcggatttgtgggcgtcggcgacccgtcggcagttcaccgcggcggacgcttcttccagcttgccgatgtgctcggcgtggacaaggaactcggcttcaccctctccacggacaaatatttcaaagacgcgctggatacgcattttatcacggaagacagaaccggctgttttgatttcggagaaagcagacacgatatctatgcgctgtccgcctccaccgagatcatcgaatactcagacaatgaggtgcatcttgccgccaacgcttacggcagaggcagaggggtgtacatcgcggggcttccctacagctatgagaatacccgcctcctcatgcgggcgctgtattttgccgcacacaaagaggaaagcttcctcagatggtatgccgacaacgtgaactgtgaagtgaatgcatatccggagagcggaaaatatgcgatcctcaacaattcaaacgaagaacagacgaccgatttctatgacggagaaggcacatgtgaaaggcttacgctcagaccgtgcgaaattctctggagataaacagtaagacacctgaggcggtacggctgtatgccatcccgcctcaggtgtctgcttatatgcttatataattatcttctggcgcggaacatggctgccagtacatctacgatatcatctatcccgagcctgcttacattgaacagcatctgatgggactctatactgccccatgtccggccggtatgtgcctcataataaagcttccgctctttatctgtctttttcatcttatcctgcgcctgcttttcactcagattatagatcttcatgacgcggcgcatcctgtcttccttgtccgcatagataaacgcattgatacagttgaaatcaagttccaggatatggtccgcgcagcgtcctaccataatgcacgggcttctctctgccagtctcctgatgatgtccgactgtgtctggtatacctggtcgcttaaaggctccgtggcctctccgctggcgaacgtcgtatactcgcccatgttcaccacatacgccgacaggaattttccaagaatagtctcatctactgtctctgccgtctcatggctgatgcccagttctttggccgccatctggatcaggttccggtcatagagcggtatgtccaggcgctctgccagccggttgccgatttcgtgtccgccactgccaaactgtctcccgatcgtgataattgtgttcttcttcatactaaccctctcctcgccttatgctcgactccggttccttttgttatatggttattataactctttttcagagcgttgtgtacttatactttaagaaagcgcaaaaaacctccgctgcgtctgcagcggaggtcatatactgtctgttcttgattactcctgaacatatggcatgatcgcgatatgtcttgctctctttatagcaaccgtaagagctctctgatgctttgcacagtttcctgtgattcttcttggaaggatctttcctctttcagagatatattttcttaactttgctacatctttgtaatctatttcgttattctctttaccacagaatacacatactttttttcttctgcgtccgccgcctcttcttttgaagccgccttccggacgatttcctttatcgtaagccatagctattctcctttctgaaaatgaattttctattgctttcgcttaattaaacggtaattcttcatctattccatccggaatgttcatgaagccgtcaccagcgtctgacaccggtgccggtgctggagccgcctgatggaaacttcctgcgttggcatcgcttgcagccttgctttcagcaaattcctgctcctccacaacaacctctgtcgtgtatactttgacgccgtctttgtttgtatagcttcctgtctggatacgtccgctgatcgtaaccttaagtccctgacggtaatacttttcagtgtgctctgcctgctttccgaatgcaacacatgagataaaatcggcagtagcctctccgtctctcttgaatctgcggtcaacagccagcgtatatctcgcgatcgccagcgggttttcaccctgtgagtaccttacttccgggtctctcgttaagcgtcccatcaaaattactttattcatatttatacctcttcttcctgcttatgcctcttgtttcacgcataaatatctgagcacgttgtccattatgcggattctctgttcgatctcgcctggaacctctgctgcagactcgaagtggatgaaatagtaatatgcttctttcatcttctgaatctcgtaagctaatctcttcttaccccattcatcgacgtctgtcacactgccgccgaaacgttcaactaaagctttcactttttcgacaacctgtgctctttcgtcatcttcgatctttgcactgacaacaacagctaattcatatttgttcatgtcgtcttcgcacctccttctggtcttttggcccccgctcattggtgggagcaaggatatccgccgccgtatgcgtgcggacatttaatgtatcacgatttaatatgatagcataaaatgatgcttgtttcaagcttttttccttaaatcctttgtatttttttccactaatttgcgggcgatcatgatctggtgtccgcatccgagacacttgagacggaagtccgccccaacgcggagtatctcccattctctgctgccgcacggatgcttcttcttcatcgtgacaatatctcctatttcatacgtaaaatccatcatcaatcctccagtattacttcctttttctttacgccgcagacgatcaggcggttgtcatcactttccgccgtgcaggtggacaaggtgactatcatatcctccccttttacatccacctttgtgtcgtaaagtcctgcttcctttatgatctgaacaacttcttcaaactgagcttccgaaccaaaggaagtcatgtacgctttggagtcatctcctactttgctgaccgaaaagatctggtacgttatctctcttctgtccggggtgtatatatagaaatacggattttctctgtagaaggactcatcctcataatcccacagatggcggaacatggagccgtctttcatcctgtgtccgtatatgatggaattcttgtccgcaaaatcggctctgttgtctacattcaggaatatcgtgccgagtgtattgtcatttgccttgaatgtcttgtgcagatactcctggttatctttgccctgcactaacggataattgatgatcgacggctccggatgaaagcggagccagccgatcgtgtcaggattcagtttcatgagttcatcaaaatctacccggaacttatccttatcatccggattttttaccgccagactggcgatctctttatattcaccccgtccgtccatgtacccttttacgatctttatgagctggaaggctgagacgcagaatacaacgaccgccacggccagcactatattcgtcacaaggctgttctttgcccttttctttcttcttcctctgtggtgctttgtgctcttcttatcagtacccatctgttatttcccctgtttcttttctatttatgctccatgatctctacgatcgtcttctctgtctccaccatgcccggcgacgcgatgagccccatatgccgcatcgtatcctccggtgtctttccgtttatcccgtgtatgttatctatgcatacattttccatcgccatgtccgccgcccggaacgccgcgtcaacggccacgattcctttcatggcgcatccctggtttccgccgtcgcagatcatgccggtcagtccgctggccatattctgtatgaccattgcgatctgttcttctgatgcatttctcataaatgccagaccgcacgccatgcctgtacccgcggctataccgcacccgcagaacgccgacagcttcccggaatactctttgatatacatcgtgatgagataactcagagcggtggcgcgcagcaggatgtcatcgtccacgacctcataattcacttcataaaacgcaaacagcggcatagtcgcaataatcccgtgggctccgctccctgttatgctcatggccggccgggccagtccgagcactctggcctcgatcgcgccgttgcagagcagctgtgcggtcttcctcgcatcgtccgagatgatcctgctttcattctccttcagcaggtgatgtacgatcttcgtcttcgacgactggatcccttcttccagaaggtccatgttcatcgtgaatgcatcccttataaagctgatttcttcttccttcacagacttgacatatttaaggatcccgtggagtgtatacttgtgtataagaggcgtctcctcaccggatgtctgttctttcgcatccgtctctccggcgctgaagatcacgttcccgtttttctctatgcatgtgatatccgtatggcctccccggatgtggactgtacattcatcctggtcggtcaggacggaagcgtctatcgttatttcagaaccaatgtggtccaggacggcctctacccttccttcttccaccagctttgcggcacgcgcgtcatcttcttctgttatgtgttcgagcgactggagtccaagtgacgcgtccgcagccactgctccaagcgcagcggcgtacaggtttccgaaatggccggagttcggtatgccgcacgtaaatgcatttttgtacatgccggagttcagcgccacccgtacacggctgacttctccctttgtatgttccctcgccctggcaaccgcaaaggcgatagctccgggttccgttaccccgagcgccggcttcatatcttctctgataagtgttgtaagttcctgcatgccttctcctccttttgccgctttgcctcattataacattctaaagacagctactcaattattttatatatttttaatggtgagtttattgactttacggccagacagcgtatgatgcttaattaggaaggtgatttgatttgaaagaaaagtttatccggtttatgtccggcagatacggcattgattcatttggaaaatttactttgatactcggtgtcgcagcgcttatactgtccggctggtttgacagttttatattttccgttctcgcgtgggtgtgcgtcatttactcttatttccgtatattttcccggaatgtctataagagagccgcagaaaaccagacgtggctcaacaagacatacaagatacgcggctggttcgcccggcagaaaaactctgcgtcccagcggaaagtgtatcatatctataagtgcccttcatgcagacagaagatacggataccgaaagggaaggggaaaatagaagtccgctgcccgaaatgcagcacaacatttatcaagaacagttaagatataacgaaggaggggtgatcgatatgctggaatacctcgtactatatgaaagccggtccggcaacacgaaaaaattagctgccgctatattttccaatctgcccggcaattccaaagacctcatcgatattacgacagataaatccataccggaggccaaagtctactttatcggcttctgggtaaaccgggggacgtgcagtatggaagtgagcgactttataagcgatctcggcggaaagagcatcgcgttattcggcacatgcggcatgggcgactccccggattattacaaagcaatagaaagcagcgtaaacgcatggatcgagagcgataacgactacctcggagccttcatctgccaggggaaaatgccccggaaggtacgggaaaaatatgaggcgatgcgcaatacggaaaacgaagcacagatgaacctgtacatccgcaactttgacgaggcgctgacacatccggacagcctggatatagaacacgcaaaagtttttacccagaaatgtctgaagaaactgaacgaaatggacaattgaaaaagaagacacagcctcctgggaggtgtgtctttcttttttcgccaaatttttcaactgccatcagcaatttccaggaaataccatagttttccacatttattatgctattaatccacaaattgtgtataaatagtggatacatttccaacatccgaatatttttttcagatatttcgattttattcgacgtattcctccctccgagggcgctttgcgacggttgggaacgggggttttccgatggttggggacggggtttttctcgttttcccccgtccccaattaaattcaacgtgtccctttttcgttttttatctctccgcttttgccgccggtctttctcttgaggtagatatccccaatttccatagtcttatccagtgctttgcacatgtcatatatggtcagcagcgccacgctcactccggtcagcgcctccatctcaactccggtttttccggtcaccttcacggtgcatgtgcagtgtatctctctttgttccggatctttatcgaaggtgatccggcagtttgatatggggaggatgtggcacattggtataagatccgacgtcttttttgcccccattatccctgctgtcgcagccacgccaagcacatcgcctttttctgtgccccctacctctatggcgtggtagacggcttcgtttactttgatcttccctgccgctgtggcttctcttactgtatcctgtttttcagaaatatcaaccatcacagccttcccgttttcgtcaaaatgcgttaatttctccatactaagccctccctttaccaattactatatatcaaccaaaatagaactgtcaaaaaatatcgctctgcttctttattattatggctgccttattctattattctctctttttcttttctgacaacaatatattatcatcaaattagattgacaattctctccaaaaggaatacgataattatagtaactattatcgtttttaaattaacaaaaaatacaaaggaggtattacatggaaaacaagaaattaacgaacgaggttggcgctccggtcgcggaaaatgaaaattctctcactgccggtccgcgcggacctgttgcgctgcaggatgtctggcttcttgaaaagcttgcgcattttgaccgcgaagtgatcccggaacggcggatgcacgccaaggggtggggagcttatggaacatttacggtgacgcacgatatcacaaaatggacgaaagcaaaagtatttgagccgggaaagaagacagacgtcttcgtccgtttttccaccgtagccggagaacgcggggctgcagacgcggaacgtgatatccgcggggttgcctgtaagttttacacagaagagggcaactgggacctggtcggcaataatacgccaacttttttcctgcgggatgtacataactttcccgacctgaaccgggcagtcaagcgcgacccgcgcacaggcatgcgctccgcgcagaacaactgggatttctggacgctgcttccggaaaccttccaccagacgactatcgtcatgtccgaccgcggaattcccgccaccttccggcatatgcacttttacggcgagcatacgttcagtttctacaacgccgccaatgaacgcgtctggtgcaagttccatttccgtactgagcagggcatcaaaaatctgacggatgaggaggcggctgaaacagtagccgcagaccgggagagccacgggagagacctgtttgagtccattgaaaaaggtgagtatccccgctggaccatgtatgtccagatcatgacagaagaacaggccaaacatcattacgaaaatccttttgacataacaaaaatctggcgccacaaagagtatccgctccatgaggtaggcgtactggaattgaaccgcaacccggaaaattattttgcagaggtggagcaggctgcctttacgccggcccatgtcgtacccggcatcggattttccccggacaagttcctgcagggccgcctgtttgtatacggtgatgcacagcgctaccgccttggcgtcaattacaaccatatccctgtaaaccaggcaaaatgtgaagtacacgactatcaccgcgacggatttatgcgcacagacggcaattatggcggcgcgccggcctattcacctaacagcgccggggactgggccgcgcagcctgatgtgatggagccgccgctcgacctgtccggcgccctctacgcatttgacccgaaggacgatcctacggacgactgtttccgggccggaggagagctgtaccgccttatgagcgaagaaaaaaagacattattgatagaaaatacagcgcgcaatatcgcgccggtgactgacaatgtcaaataccgccatgcagcgcactgctgtctggcagatgaggattacggcagacgcctgacagaagcaatggggctcgactttgcgaaggtaaaggaactctcggcgctgtcacacgaagagctggtaaaagccactttacatccataacaatgatcttaccggggagacaggataaattcctgctcccctttttttctctttttttgtctttactctccccccttcccctcctcccctcacttgacaactgacaacccatattatattataaggttgttactacacgtcgttaaggagaacaataaccatatgaaaatttcaaagaatatacctgtttatgcacaggtcgcatacgatatcgcttcccagatcgccaacggaaagctgaaagaagggcagcgtctttcaggacgcacgcttctgagttcccagtacggagtctcctctgagacgatccgtcgggccatgaatcttctggcaaatatgaatgttgtggatattcggcagaatgtgggcgcggtcatcgcatcgagggcacttgccatagagtacgtacagcagtgtggaatcgacaacgaccttagggggctgaaagaacagctgaaatcactgacacttcagcgcgaccagctaaacggagaaatcagcagtctctttgaaaaaatcatggccctggaggagcggtttcaaaacagcggccatctgagaacctacgagtttatcatacaggcagacagcagagccgccggcaaaacgatcggggagcttcagttccgtcaggcgacaggaggtacgataatcgcggtccgtgaaaatggagacacacaattttcacctgacccgcagaccgtgcttcaggaaggcaccatgatcattgtggcctgcaatgcagccaatctcagttatgtgtccgagtttgtccgttgaatcttattcaccatttgtatctttaagggaggacattagatatgaaaaagcttttttctttatttgcagccttatcaataacagtaatggcatgcgcaccgccggtgtctgccgcagacgaaaagaaggagattgtttttgccgatgtgggatgggattccatagagctgaacaacgccatcgccggcctgatcgcagaggagatcttcggctatacgtggtcagaagtccctggttccacaccgatcacccatgaagcacttatcaacagtgagatcgacgtaaatatggaggagtggaccaacaatatcactacgtaccaggaagaccttaacgccggtaaatttaccgaattagggataaactttgatgacaattatcaggggctttacatccccgcatacgtggcagaaaagtacccggatctaaagaacgtaaaggatctggcaaaatacccggaactttttgcagacccggaagatccggacaaaggggtgatctacggcgggatcccgggctgggaggccaccgagatcatgcagaagaagataaacgcttacggtctggacgaatattacaactacgttgttcccggaagcaccccggctcttgattccgttatcacttccgcatgggataagaaggagcctttcgtggcctattactgggaacccacatggctgatgggaaaatacgacctcgtgcttcttgaagacagcccttacgacgccgccacttataaggacggcatcggcgcctgccctgcagtcaccgtaacgatagcagtaagtaatgaattcgcgcagtccaacccggaattttgtgatttcctgtccaaatatcacaccggctcccagctgatcagtgaaggacttgcctatatgcaggacaacaaagccgatcactcagaggccgccaggtggctgcttgtgcagcatcccgaattagcagaagaatggcttactcccgaccaggaaaagacactggccgccagcctcggggcaggaaaaagcagcgaaaaaaccgactggttctctggatttccgctcgtacataagcccaataccgatgccattgacggcgcggtccgcagtttcgcggtctccgcggcgccggtcctggaaaaaatccagtcgctgctcggcggaatggtaaacggttttaaatggcttctggaacatataccgtggtttttatttttgatcctcgtctttctggccggatggcgtgtacggcggaaactccaaagcggaattttatacgcagtgatcctgtgccttgtgggcgttgtcggcttttgggatgaaatgatcctgacgctctccatcgtacttgccagtgttgtgcttgccttgctgttcggcctccctgtcggcatactcatttccaattcgccaagggccaaccgcatcgtacgtccaattctggatacgatgcagaccatgcctgtgtttgtatatctgattcctgcactgcttctgttcggcctcggaaatgcgtcggcagtcatcgcaaccgtcatctatgccattgtgcccgtgatccgcctgaccagcctcggcatacgccaggtagacacagaagtcgtggaagcggcccgctccttcggttctaccagatggcagacattatttaaagtacagatacctcaggcgatccctacgataatgactggtgtaaaccagacactcatgatggctatggccatggtagtgacctgctccatgatcggagcccgcggtctcggaatggaagtgctgaacgcggtaaaccgtacggagatcggacgtggtctcgtggccggcggctgcgtggtcattctggccgtagtgttagaccgtctgacacagggatggttcggcagggaaaagaaagatacagagacccgaagtgaagaatagaaggaggatgctcatatggaaagcaaagataatgtaatcgaagtgcagcacgtcacaaagctttacggactcaataagccggaggctgtacatatgatgaaaaacggcagcacaaaaaaagaagtgcagaagaagaccggcgtttccgtggcattgtgggatatcaacatgaagatcccaagagggcagatattcgtcataatcggactgtccggctccggtaaatccactctcgtaagatgctttaaccagctgaacaaaccttcttccggccgggtattattcgagggaaaaaacctcacagacctgtcccaaaaagaactccttcaattccgccgtgaaaaaatatccatggtatttcagtcctttggccttatgagccaccgggacgtacttggaaatgtggcttacggactggaagtgaaaggtattccaagagcagagcgtgagaaaacagccctggaagtcatatcaatggtaggactcaacggctgggagcacgagtcgtgcgcaagcctgtcgggaggcatgcggcagcgtgtgggcatcgcccgcgctctggcaaacgacccggacgtgcttttgatggatgaacccttttctgcgctggacccgctggtacgtcaggatatgcagtttgaactcctgcagatccagcgaaaactgaaaaaaacagtcatttttatcacccatgatattgatgaagccttcaagctcggtgatatcgtagccattatgaaagacggaaagctcatccagacagatacacccgagcagatgagcgagcatccggctgatgaatacgtagaagcatttatcaacaatgccgacaaatcccgcgtactgagcgtacacaatatcatgataacgccaaaggccctgatacgggaggatgacggcgcagaacacgccatacgcgtaatgaaaaaaaatgagctgtcaacggtgtatgtcgtagacgcagatcttcatctggccggtattctcactatcgcagacgcacttgatgccaaaaagaacaatctctccatcaaacatgtcatccaccgggatatcccaacggcggacacagacgcgctcgtgggcgacatcatgggactggcggccgaggctccatatccgatcgcggccatcggaaaggacggccagttaaaaggaatcgtcacaaaagccaaagtgctctcctccctgacatgatatcaggctcaagaccatgactgcctgtcgtcatatatcacggtcaaaataagagggatacatacagcgggatctgctctcccgctgcatgtgtcccttctattacttaataccagtcatgcttttcgtttctgtcaagcgcatttattctctccatctcttcttctgataactcaaaatgaaacagatcaagattttcccgaatatgatcgggattggcggaacccgggatcacagcagctttgttatcacaaaacatcttccctcgggacttccgagtcgcgtacagccctcccgacagcttcctcatcgtgatacatatatgccgtatcaatgagccggccgccggcttcaagcaatgcggtcacggaatcataacattcttcatcagaaagactgtaagtgccaagccccataaccggcatctcataaccgctgttgagcattaccttacgattctccaggtcaaaagaataagctttgcccgtatttgcagacacgatcttcatttcatccagccacgcttcaacgtcttcccgtggagcgccggccgcaaaacgcctgccctcaagccatttactgtttgaagcgagcggatgaagatccgtatcacttgaaccgagcccgctgctgtgagaggtacagaatggtaaaatagtttttccggaaaaatcatagctttctaaaaatgtatttataattttgggcgcctgtccgtgccagatcgggtaaccaactataatggtatcataccgctccatatgctcaataccgccggcgattgcggggcgggcggaggaatccttctgctcacggtccgcgcgcccgtccgtatcataagcaaggtcctcctctgtataagggtcttccggcacgatctcataactatctgcatttaaaatatgtgctgcatattgtgcaagcgattttgttgtccctgtggcagaaaagtacgccactaaaatattatctgccgctggatcctcatttttcattgtatcttctccatcctcatttgcagtcatttcattctttgacaagtcagttgtttgttgttcattttcattaccacaggcggtcattgtgaacataagagtgaccatcataaaaaataccgtaaatgcttttgatcttctcataactgtttcttctccttcgctctgcagcccggtgatacccgggtcatatatgtttcaaacatttagcaggcacgcctcccgccactgtatctgccggaacatcctttgtgacgaccgcgccggcggcaactaccgcatgatcaccgatggtgacgccgggcaatatcgtggcgtgagatcctatccacactttttccccgatctgtataggggcggggaagctgtcggagcgctccgaaggatcttgcccgtgattgatggtcgccatcacgacatgcgatccgatcagcgtcccgcctccgatatagattccgccgtggtcttgaaaatgacagcagcagttgataaagacattttttccgataaaaatgttcttcccgcactctgtataaaagggaggaaacattgaaaatgtctcatcaacaggcttccctgtcaattctgcaaacaatgcgcgcatttcaccgggttcatgacattggttgttaagctctgcggtaatctgcatcgcctcctgcgcaagctcatgcatgaactgatgtaaatgcgagccgcctgcgatcgctcttccatgtctcatataatccaaaaattcctgtttgttcatatgacctccctatccttttaacaataagatttttcaaagatcgcagcgcaatcttcatcggtcatttcacaagggttcgcctcaaacagaccgccctgcatggagcgggcgccttttgccagtgtcatcgcctcatctgcagaaaaaccaaagtcactcattttaaggtctgctacgccgcacgcttcctgcagacggacaagcgctgtgataaagtcttccggtctgtcggcatgtttaagccccatagcctttgccattttgataaactgttcatcgcagacatgtttttcaataaaaaactccgcaaaagccttagaaatcataatgagtcccgcaccgtgaggaagttcgtggtggtaagcgctcatagaatgttccatactgtgctgcgccgttgtggacgtaagctgcatcgtaatgccggccattgtactgccgtaggcaacgtgttctcttgcttcaaggtctcttccgtccttcacagcacggggcagatatttcgcaatgctctcaattgcagacaaagcaattgtttcactcaagatattgaccccttttgacatcatgacctctgtattgtggaaaagagcgtcaaacccctggtaggcggtatatttcggcggcaccgtcagcatcagctcgggatcgacaatggcaaggacgggagtaaacgccgggacgccaaaaccgattttttcattggtctccaaattagagatgacgccaaaaccgttcatttccgatccagtacctgaggtggtcgctattgccacgacaggaagccctttatttatgattggccggcatttgccggtaccgccgcacacatagtcccaaaggacgccctcatttactgccattgcggatattgctgcggacgaatcgatcaccgctccgccgccaagggcaacgataaagtcacagccgttttctctcgcgaaatccgcgccttccataattacttctttcaccgggttttccatgatttttgcgaacactgccgcttcagcgcctgctcttttcagttcggcaagcgtgcggtcaagataaccgttttctatcgtggatctgccgtttgagatcagcacgagcgcttttttgccgggcattgtaaggcttcccagttcatttaaagagcctgtgccgaagtacaggtctgtgggattgttaaaattgaatttcatcataaaataattcctcctgaaacatatctttttaaaatttactggtcagatgataaaggcaggcaatctgcttctgccacaagcctgcgcctcccttgtctttattatatgtgccgacaggagttatatctaatacttatattttataccatgatattcttgacaggaataacacgcctctattacaatggtgctgtatcatttaaaggagataactgttatggaaatccgagttttacgttactttttggagatcgcaagagaaggaaatatgtcgagagccgcagaatcacttcatgtaacacagccaacactgtcaaagcagatgaaggacctggagcaggagcttggaaagaaactgttccgccgcggcagcaaaagcgtcagtttaacagatgaaggaatgcttttacgaaaaagggctgaagatattctggatatggtagacaaaacagccgatgaatttaaggaactggataatatcacagggggagaagtgcatattggatgcgcggaatcccaccagatcaaatatctggcgaaggtgatcaaaatattcaaagaaagatatccgctcttccgttaccacctgacaagcggaaatacagagcaggtcactgaacgcttagatcgtggtctgatagattttgcggttatcgtagagcctccaaatctttccaaatataattatctggaagttccggaagtaaatacatggggacttgttatgaaaaagaacgatgcactttcccaaaaagacagcatttgcatcgacgatctgacgggccttgacctgatttgttccgcacaggcaatgcaggcagacattccgagatggtgtggtgaaaaagcagatatgttgaacctttccggtacggtcaatcttgtatataacggttcagtctttgtaaaggaagggctgggatatatgctgtcctttgataaactggcagatacaggcagtgacagtgagctttgttttcgcccgttagagccgcctttgcatactaaaatgtatgtgatctggaaaaaatatcagatgttcacaccgataacgcagctattgctggatgagctcgtccgccatttgaaataggcttacgaattctttcctatatgatattctcttttcaacattttcattgctgttctggacagaatatccacaatgttaaacccaaatgcaatagcaagacaggtagccagcagcacaatggtctcgcctactgccattccgtaatcacggctcacacagccgtacatcatataatataagttaggtcctggaatcagcgggaacacagacgcagtcaaaaatatagtggacggggccttgttgatcctggacataataaatgcgtaaaacgctacaaagatagaggcgatcagcgtggccacaaagttgctcggccagaaatggtagactaccacatagattccccatgtaaaaaatgcccctattcctgaataagccacctgtcttccccggatcttaaaccaaaaagcaaacccgatacaggcaatggtacaagatatgagctgtatcgtgatattatggttcagtacatatccttctgccgatacaccgtcaagaagaagcatggcaagtgctgtgccaaacgcaatacctgccgcccccagcatggagttcatcacattcaaaaaaccagatataaagtctctctgcagcacttcccgtattccgtttgtcgtgctgagcccgctgatcaaaagcataacgatcccaatcatgatcctctccggatgacttccaatccccagccgaactgccgcaataatgatgacttcagaaaaaaaggacaggatcaggttatatgccagcaggttttcttctcttttactcagccagcccccaacaagaacgatcatcagcgatacgaccgcggcgactgccgcgtccgcaaaattgcaaccgaagaaaactgcaaatccggttccgcccatgactgccgcaaaatactttgtataccacttctgtggagatctgcccataacctcctcaaacttttcaagcagctgttccgcatccggcttattttggcacacatatctggacagattgttcaggtaatccagtctgtcgaagtcgatgtccgtagattcaatatggcggacctgcgtaataatatctccctccggcgtttctaccgtgatctggatattgctcggtatggcaaatacatcatatcgtttaaatccataactcctgcacattcggtacaggctgtcctccagtctgaaattttccgcaccgcagatcagcatttcttcgccaatgtcaagaattccctgcacaagtttattgtaatccataaccttccccctaaagacttatccgcttatataatgaaaaataaatttctcagaaaattcccggccgcctgcgctcaggcagtgaccgagaattatataatcataccttatttacttttgcagaggcagctgatttttacttctgcaatttcttacgttttcttaccatgactataaaaagagcaatgttacttgtctaatcattatagaggaagtattcttgttttacaagtaattccctctgaatactctctttccatttgtggatcaaatttaataaaaataaaaaagcctcgggatctaaatttcccggacttttttaaaggcgccaaccagaatcgaactggtgatagaggtgttgcagacctttgccttaccgcttggctatggcgccatattgagcacttgtatattataacaaatgcccaccttatagtcaatattttaaaatcctaattcttcatttacaagaattacttttattcttttaggaacttttgaaaatctcgtgatcatgatctggcagcaaatcgtatccggtgatttacagtcaaaacacataccgcttttacagcacggcgtatcaaggtcaaaccgttctgcattgatcggcgccgcctcgttcctggcgcgtgacacagcatcctccaccgacttgaccgccttgttcatcccgacgatcatcactacactcctcggaccatacgctatggcagataccctgttggcatttccgtctatatttaccatcaccccatcttccgtgatcgcgttggcgctcgtaatgaagaagtcacagtcgtatgtagccagttctacctgacgcttctcttccggtgtcttacagacgtcccggttgaacaccttataatttcctgtgcagaccgcatccttcagacctatttcctttatagacatggagccgccccatcctacagagctgccttctggtattaattccagcgctttagcgagggcctcttccttcgtctgcgcataataaccttccatgttgcgcgattccagacctttgatgatacgcgctcccagcagttcatttcttttcacacgattaatatccatatcgttccctcctttttattatattcagttcctgctatattataacacatttctcaggggacagggaaaaatcaaaaagggacaggacgaggcggggttggggacgggggaaatttaaatttcccccgtccccaaccccgcctcgtcctgtcccctctttagttcttctgcatcttaatgatatagaacgccaccatgatccttgtcctgttttcattgctgagtatatcatacccgagcagattttttattttattcatcttataagtaagtgtattcttatggcagtacaatactctggatgtgttcagtatactgcattcattttcaaagaatgcctccagcacctttgtgtactctgtcccgttatctgcgtcgtatgcgagtaaagctccgagtgtctcctgtacgaaggacggatatatttccgtatcatttacatctgccaatattttgtatacacccagctcttcatacacgaggaagttcttgttgattgcggtctttgtaagctggtatgccgtgtatgcattgtggtacgacttggatatatgctgcatgtcttcctcctgggagccgatcccgacataaatattgtggtccttccggcataatgcttccattttttctcttattcttttccggtcgtacccggcaaataatatgatcagccttcccttttcctcgtatacaattccgcttttcagcgcatggttcagcgacttatgaagatttgaaagcctctcgtttccattttcggtatcgtacgtgtggcagctgagcatgacgatcagatagctcatgtttcggaagaatccattccgttccaggtggcttgtataagactcttcattttcgggataaaataccgcatttttcagtgctgctatcaaattcgtatcccgctgctcgttgcgcagtaaaatagccgaaaacatccgcatgatatcaataaacggcgatgccatggtggctgaaaacaggggaaagcgtatgctgttgcagtatgctaccgtctcctttgcaaacatgtgtccctcgtccagcgcgatgatcagtccgcctgcgtgtaccttatccagctcttttataaactgtataagccactcttcggacgtatagtgcagcccggagttaaatacaagctcatccccgtgaagcagcgacacaaagcttacttcctccaccatatggatccagtctatcatcctgcggaaacagcctgacgtgtgtaattttatatcatactgcggcttaatttccgcatataaatcttccaattctactgccatatccgttccctcttttcctgtattaccttaaattatactttctttgtgcttcaagcacaatcatttattgattttatgtattctgagactattttaaaacattttattacatgatatattgtacctaggatacaaaataattagttgaccccgattttgtagttcctaatccaatctctagattatacaatcaaaaggaccctgaaatatatttcacgggtccttttaaattgtaatatcttattgacaaactcattgcatatatgctattttagtagacaattcatatgagcaggaggtacgtttatgttttccattcatttaagataagccgttaagaaatgtagtcccatgaggggattttttctgatgcttattttgtgtgaatggagatgcggcagagtccccttgacggaaagggaagtcttatttttacgtacccatttatgttgaacatgcagcaggcagatatcctccgggacatttgtctgttttttatttttaagaaatgaggttaatatgaaagactggaagaaaaaaagtatattgtttctcgtgagccagaatatcagtttgttcggctcctctatcgtaagttacgcgattacatggtatatcacgctggaaacttcctcagggatctggatgacggcatctattctgtgcagtctgctgccacagctttttatatcactgttcgccggtgtttgggcggaccgctataaccgcaagtatctcattatgtgcgcggatgggtttatagcattggccacacttggtcttgtcattatgttttttgaaggaaaggcttctcttcccatgctcatggtcgtctccgccatccgctccgtcggcgccggtgtccagacacctgccgtgggcgcgcttctgccgcagatagtgccgatggaaaagctgacgaggatcaatgggataaaccagacatgcagctctctgctcatgatggtctcacccgcagtcggcggcgcgctcctcggagcagccgggatcgtctgggctatgatggctgacgttatcacagccgcaatggcaatctgcgtcatggcattcttgaaggtgaagaaaccggagtccgaaggcgtgctttccatgtggcacgatttgaaggaaggcatctcctatacgacaggacatcctgtcgtgtcccgtattcttatattttacggaattgccttttttctcatcacgcccgcggccttcctctcgccgctgctcgttgagcggattttcggcagtgaagtatggcgtctgtccgccaatgagatcatatggacggccggctcactcgcgggaggcgtctatgtctcctggaaaggcagttttaaaaacaaatggctcgtgatagcagtatcctatatcgggttcggagttacttttgccctgcttggcatcagcccatatttctggatgtacctggccgtgatgtttatatccggtgtcttcatgccgtcccttgccactgcatctacagttatgctgcaggaagaagtggaagaacagaggcttggaagagtcttctctgtcttccagatcatctccgccgcagtgatgccggcaggaatgctcctgttcggccctatggcggactggatcgacatccggtggatcatggcaggcagcggactgctgctggccttgaccggggtattcctcctgaaacacaaaagctaaaggggacagggtaacacgtggttggggacgggggaaattgaaatttcccccgtccccaaacgtgttaccctgtccccaactgttttttccgttctttccaatccggaagaaagctgtccatcagctgtttaaaccgcttattatggctcggctccagcagatggcacagttcatgtactatgacatattccaggcacgcctccggatagagcgcaagacgcctgttcaggcggatacgcccgctgtccacgctgcagctcccccatcttgtcttcatgtctctcagcgtccagcccgcagcatgcacgcccataaccggctcccatttatccacatatttttccacatttctgagcataatgccaagctgctcctgtgtcaccccggtaccgcgctcctcctgctgcctctgctctgcctgcagcatacggccgcgggcccgctcgatccatccggccttggaattgacaaattccattatcctttttgtggatatctgcctcggcgccgtgacgagtatcctgccgtccggcggttttatgtaaaggttgatattttttaccttcctgtattctattgtcactggtatgccatttacctcatgtatcatgttctttctgtcactccctcgtcagcttcttgatccagtttccgtaatgagattcgagatacgccggcacacacttgaatatctggtccgcgttgagacagcacacaacgactgccggcgatgctttcaccacaaaggccatataaagggacagtggaatgacgatcatccatatgctgaccagatccatcttaacaacgaacacagcgtttccccctccccggatgattccgttatttgtcggcatctgataggacatgcccgcacagacaacactcaatataatgagaaatgtatttgccagatctttggcggccggtgacagatcgtagagcgacagcaccggaatccttattaagtacagcagtaccgcagatgctgcgccaatgacaagaaatatcttctggagcctgacggcgtaccgcttcacaagctccagatctccaagccctactgttttcccaatgacgacagaagccgcggacgacgctccggccgccgccgacttcaccatgagaaagcttgtggatgccacactgtttgccgcaagggccgccgcgctcatatgcccgagtatcacagtctgaagcgccgtattaagcccccacagcccctgtaccgctaccataggaagacaaactttaaaataatccatgctcaggaccggatctctctgaacatatcctctgatcgtaagctgaagattcttttcctttttcacgatatatgtaatcagcaccgtgcactccacgatcctggctgtcagcgtcccgacggccgccccggctgcgccaagctgcggcgcgccaaagcggccgtagataaacacataattaatactgcagttgataaaaaaagtcatgacagacagatataaagctatctttacaacctccacgctgcgcagtgtggccagaaggatgaccgtaaccgcaaagaaaatatatgtaaaacgtacaatgtaaagatattttactccctccgcgataatcgactgttctgtagtaaagagtccgacaatctgccccggtctcaggctgactgctgcaaacagcagcgccgcaataacaagtgccgtcctcatggccgaagccgatatcatcttcatcggccctgtctgccttctgccccaatactggctgcagaagataacaagcccgtccccaagcgccatcagaacctgctggtacacaaactggatctgattgaccgcggccaccccggaaagcgccgtctcactgtaggcgccaagcataatattatctgccagattcacactcagagtgataacattctgcagtacaagcgctgtaaatatagaaaagaaattgcggtaaaatgctctgtcttttgtcaaaatggtctctgtgctcctgttttttatttattctcatgtaaggatacgcggtcataacagctcccccttaaccaggccgttccgttccttccctgctcatattatagcagaacctggagcaggaggaatactgtttcataaaaaactgaaatctacatatgcggcactgccaaaaaaagaaggctgtccgccttctttaatcccactggttaaatgcattcagcatgctgtgcacatcctcttccacctcatgcctcacaatatcggtaaatcccattttaaatgcattaaaaatagcctgatgccgtttgcccgcgtgaaacaggatccgctgcagcttttccggcccaagtgaatagaacagacagtacctgtaatgcagaagatatccttccaggctcttatacatacgcagaatatacggattacatgaagccgtcacaataagggaatgaaacttatgatcgatctcagcataatcattgggattcaggtcgctgttgctcccattgcataccgcaacatactgctttgtgagaagttccagctcttccatctgctttgacgtgatccggataacagcaagcgatgcggcaaatccctccagcgcgctgcgcgcctcatatagattatagccgtcctccttcgtcatccatgacactgcaagcatcttaccgctcttcttatagaccaggccgtctttctcaagcctggacagcgcgctttttacaggacttctgctgatcccaagctcctccgcgatcttactttcattcaatcgagaatccggaggcatccttaactgaatgatatcattatacagtgattggtatataacgtcactcaatacgagaaacggattttccgcaagcattttgtccagttcactcttattcattaaacttcctcccttcttagatcgtctattaatgtcataatagtatcacattaaagtccattcgtcacaatattccttctttgtttttaaattaacaatacattgaattttattttcagatactttttcgtcaaaaccgcttttttataaatccacttatattgtgctgagacgttttcgggtccgcatctgtgcaattttgtgatttcagacagatcccggctaaattttgacacctttctccctcatcgtatacccttatactattcaaaacgttttgaccgcgactatgcaaatgtacaacagaggagggaagctatggaaaacaaacagcacaatacaaacaaatggatcataaactgcatccgctatgccggcatgtatgtgggcgccatcatcggagccgggtacgccagcgggcaggagacactgcagttcttcgtcagctacggatatgtaggcataatcggcacattgatcgccatcgtcttattcgcctggtacgggacgatgtttatggaacttggccacaaactgcacactaattcgcacaaagaagtgtttacttatctgtgcggcccgaaaatcggcgccgtgtttgactggatactcgtcttcttcttattcggcgtattgtcgatcatgatcgccgggggcggagcttcactgaaccaatactttgggatcaaccttatggtcggacggatcatcatagctgtgctcactgtcggaactgtgatcctcggattcaattcctctttaaacgcacttggttttctgtcaccggtcattgtcattgccaccctggccatatctatcggcacgatctgcacgaacttcggcggcattgcggatgcaggcgccagaatgcagaatctggagatcgcaaaggctacgccattttggtggtcttccgtattcatctacatctcctactgtgtcctgccggcagtacctgccctggcatctatcggaaacagcgaaaaagatggaaaagtgatccgcagatcaggcatcctcggcggatcccttctcggagtcgctatcctgtttatggtccttgccacactgtcccgtatcgtggatgtatctgccatggaagttccgttcctggaagtggcgcgccagatgagccctgtcataggcggcattttcgcatttattctgctgtttgccgtctatacgacttcagtacccatcttatacggcttttccatccgttttgcagaagacggcacgtccaagtttaagatcctgacacttgcagccggctgcattgccttcgccgcagggctcgtaccgttcagcaagctggtcggcactgtatacccgctgcttggctatctcggccttgtcattatggccgtaggcttttataagacagtgataaaacgtaaagatatcaaaaccatatcagaaaccgataaggaaggagtaaaaacatatgaaacagacagcgaaaaaaaatgactgggtgaggatcatgcagatcatcctgacccctgacgagagactcgaatcactgcccgagagcacaaaaaaagtccctttaaaatgctggatcaacggttttctgctggatgacacggcagaggcaggagacaacgtaacgatagaaacactcataggaagacaggtaagcggaacactgtacgaggcatggccgcagtacgaacacggcttcgggcggcagcagcccgctctcatacacgcaggaaatgaagtgagaagattaatgaaggaggcggataaaaatgagtaatcaggcagtagaagaaatcacgggtaaaaacaaggacattctgtttcattcagtaaatatcaattatgatgagttcaaaaccggacgtcttgcatgggactatgaaaaatttatggacattgtcgggctatctatggacgacatacgcaaaatagccgccgaggtctatgtcggtaatacgccgctcgtggaacttaacaatatcaaccgcctcgtccgttcgatctcagagccgggtaaaggcgccaggatcttcttaaaagacgaagccaacaatccgaccggcagctttaaagaccgcagagcgctgctgcccgtatacgaagcaaagagagcaggatacccgggcgtcatcgcctccacgagcggcaactacggggcagccgtggcctctcaggcagcgcgccgcggcctgaaggctattatctgccaggaagtctatgacgatgcgggaaacggccagccggaatcccttgaaaaagggcgggcatgtgaagcatacggggctgaagtacagcaatacaccgtcggaccggaagtatttacatacgtcattctcaagctgctcgacgacctcggatacttcagtgcatcgctgtatctccctttcagcatcgccggaattgagaccgtaggcgtagaaataatggaacagaccgtaaagctgaccggacggcagcctgacgtcgtactcgtcacccacgcaggcggcggcaactttaccggcgcggcaagaggtctcaaaaaagcgggatacaccggaaagaccgtaggtatctctgtcaaccttgccgacctcgactcccatgatgacgcagtcttcgcccggaaatcattttctacaggccacaccggctacggctttccgtcactctacaacccggagagcgtggacgtgccgctcaacgctgccagaccgctcagatatatggatgaattctacaccgtcactcagggagaggtatactatgccactgagcttctcaaccagctggaaggactgcagagaggcccggccggaaacaccggactggccgcggcgatcagccttgccagggaaatgccggaggaccagatcatcgtcgttgaagaatcagaatataccggcgccggcaaagcccatacagcacagctgacttttgcggaggaccatggggtagacgtaagaatcggaacgcacgaagaagagatccccggcaccaacattatcatccccgcctcccctgccgacataaagacgattccggtagatttagaacagatgcgccgggaatatctgaaggtcaatgtaaagcagcgcggtatcgatgatctgacacctgaagaaaccgcgtatcttgccgcagaaatgaacatggataccgcgggcgttaaaaaaatgctggaagaattacatatctccgtggcttgaaaaagccgtctttgtatataggaaaatactgcctgactccccccttcgtcaggcagtatttttctaattttacggcttcctcctctggatccattcgtttttatcaacttattatttcaacatattttcagtttacttttaccggtcaggcacttatcattaaggtagctgccgcgttatccgcccacaataaaatacaaaaaagaggaatgccttataaatctaacgataatctaacaaagcagatgctatgatggcttcagacaccggtcacacatacaagaccggaaactgaaaaaggagattatcatgaaatataagaaattcagacaaatactggcagccgcactagcggcggccctgctggcgggctgcggtactccggcatctgataacggccaatcacagaacgcagcgtcagaagcctccaaaagcagcgccaaaaccagaagcgccacagtgggggaacttgcagactactttgtgaaggcagcggacggttataatgcttctgtgaaccgtgaggaaatactggaaggactcaaagcctccgggaaagcaacaaggattgaaatgctggtgctagccgcaagggcgttcggagagctccccgaacccggagcatacgccaaactgacagcagcttcggcgccggatatgtcagacgtgccgaaatgggccggcggctcccttcaaaatatggcgtcaaaaggtctgctggccgcttctgacctggaagccggcgataaaaaagataccgcttccataaaggatgccgcagcgatcgcggcgagattctacgcattttatggaaataatctaaaagacgatttttatacttctgtcaaccagcagcagttaaatacgctcccgataccaaaaggacaggaatccgcgggaggttcggcctccgtctccgccaatactgacaaagaactgaaagacttgatcatggagctcataaacaataacaaggagtatgcaaaaggaagtatagaacagaaaatacgagatctgtacgaaacctgtgaagatagagaaacacgtgacaaagaaggaatcaaacccttgaaaaaatatctggatgcggtagataaagcggattctttttcagagttgaatgcggcgatcgcccgggccgtggatgaactgggaatgtatgcaaacggtttattcttaagtatcccgacgacagatttaacagacagtacggtaaaggtcctccagctcatgacgccggcatccgaactgccagaagaagaatatgacgatccggatgggaaggcgtataagaaacataaggacgagcttacagaaaagctcacagctgtcggtgaaaaaaaggaagacgccgagcggcatgccgaaaatatcatgaaatttgagaaaagtctggcggcgcatatgagcgaacaggatgactccggcgagatcaaagaacaaaagtattatacgccggaaagtctggataaaatgatgccacacgcagaaatcggcgtatttttatcagcggtcggactgcggtcagatgtgaaaatgctcgtatttgatgaaaagcagtttgaagaatatacgaaatggtttaaagataaaaacctggaactgttcaaatccttagagaagataacattgcttgaaggcttcagttcttttctcagctcagacctggcagaaaaattcggctacacaggtgtggaatccggcgataccgctgtacagagctacctccctgaagaactcgggaagttatataccgaccggtattttaatgccgattcaaaagcagagatcgagaaaatggtccacatgatgatcgacactttcaaggaccgggttacgcggctggactggatgtcagacgagacaaaaaaagaggcgctgaaaaaactggactctctcaccgtgctcatcggttatcctgataaatgggaattcagcaatgccaggatcaggggcttagaagaaggcggaacctattttgaaaatgcggcggcctgcgaggcggctaaacataagagacagatggaagaactgaaccagcccgcagatccgcgcagattcgcattatctgcttttatggtcaatgcggcggcaaaccgcaatacgaacacactcatcttccctgccggaattctgcaggcgccattctatgacaggaacgcttcctttgaacagaatctcggcgcaataggcagcacgatcgcccatgagatcacccatatatttgatgacggcggggcacaatatgattccagagggaatttgaacgactggtggaacaaaaaagactacagccactttaagaatctgtgcaaaaaggcagaagaattctataatggaagggaagtggtcccgggagccggcgcagacggcagagaaaacctgagcgaaaatattgcggacatcggcggtatcgcctgcacgctggagattctttccaagatgaaggacccggattatgacgcgttctttagaagctatgcaaatcaatgggtgaaagtggcagattacagcacgctggccgaatcaacagagacagatacccatgcgcctaataaacttcggtgcaatctggtgctcacaaacttccaggaattctatgacacatatggaatccgcgaaggagacggcatgtatacagctcctgaggagcggatccagatctggtaacgtcatacttataacgaaacaggaggcttaaagagatgaaattattattagtggaagacgaggaaatgctctccagaacaatcgcaaaaggactggaaatattaggttatgcggtggaccgcgcctatgacggcgaggaagcattatacctttacggactgaacgaatatgaccttatgattctggatctgaacctgcccaaactggacgggatggacgttttacggcagatacgcaaagaggatgaggaattccgggtactcattctctcagcccggaattctctggaagataaggtagacggcctcgacagcgggagcaatgattacctcacgaaaccttttgagttcaaagaactggaagcgcgtatccgcagtctcctgcgaaggaactttacaacaagaaaccgtgtgctctcctgcggatgccttaagcttgacaccgccgcaaagcgcgtatactgcggcaaaaaacaagtagaactgacccggaaagagtatgcactgttggaatatctcttccaccataacgacaggatgatccgcgcagaggaactgatcgaacatgcatgggacagtgagacggatcttttttccaactccttccgctttcacatccattcccttcgtaagaaactggacgccgcgggtgcagaaggatatatcgtgtcccagaggggattaggctatcgtttgacgtacggggaggaaacgcatgaataaaaaatgggaactgaggaaaaaaaacaccctgcagcttaagataaccgggatcgtcgggctcatactgctggcggcttgtctcctgctgaccgccaactcactgttttccgcccaaaactattatggagattatgcctcgctgatacaagaaggggtaaacgattatgcctctcttgtggaagcaggtatagccgagtatgattcgggttatgatccggacgacaaactgcctgtacttgcagagaattctaccacggcgtaccgggatgcctctatgaaattctcggttcagtctgtgaccgcaatggcagtgatcattctactggcgctggcggcgacctactgggcttccggaagaacactccgcccattgaaacagctcatagaatctgtcaaaaatacagacgaccagaatctggacaaccgggtagcgtcggaaggagtacacggtgaggtccttctgctcaacgaggcgttcaatgacatgctggaacgactggaagacgcatttctcattcaaaaaagcttcgccgcaaacgcggcgcatgaattgaagacacccctggctgtcatcaagtcttctctgcaggtattggagatgactcccaaccctgagcagaaagattacgaggaattcatggaaaataccggtaagtctctggaccgcatcatcaagacagtggatggactcctgtcgctcgcgaatctggccgaggttcctgtcgaccaggacgtagagctgtcttctctgctcaaacaggccgtgcaggaaatgtccggcagcgcagaaaagacagatgtggagatcgtcctcacctgtgaaaatgagatttccgtccatggaaatccggatcttctctaccgtgcggtctttaatctcatagaaaatgctgtcaaatacaatattccgggcggaaaggtactgatcactcttacagcggatgagcagtcggcaagtatccgcgtgtcagacagcggaatcggtatccccacggaagccctcggccatatattcgagcctttttacagggccgacccgtcccggtcccagaagatacccggatatggattgggacttgctaccgtaaaaatgatcgcggaccggcatggcggtcaaatcagtgttgagagtacagaaggaagcggaaccgcttttacgcttctcctgaatatctctcccgcataaaggaactggcttcctgtgaagtagctgtaaatgaacaaaacccgcttgctaaaggtttttataaacatatgggcttccaggtgtataaaaggaccgatcatgatgaacaggggaacccctatcctctcttgtacatgaaattataacatcccagaggcctcgctttttggaactcagaccagattgtccgtccttttaggatgaacgaatctatggaccgcgttaaacttcggtatatataataaaaaagcctcggaatttaatatttccgaggcttttcacaaaggcgccaaccagaatcgaactggtgatagaggtgttgcagacctttgccttaccgcttggctatggcgccatatcaatatcggccgcatatgtcttctacagccgaccaagagttattatagcaaagtgactccgacgggaatcgaacccgtgttaccgccgtgaaagggcgatgtcttaaccgcttgaccacggagccatataacgctttcttaagcgtgaccgagacttatgataccacacattataagattttgcaacagttttctcaaaaaccgtacatttaattgcgatctttccgcctgccgcttcagcctgtgcggggcagagttgacaaacagtgcaggattcgttatgtttgtaagagatattttgaaaggagactatgtaatgaaatctctcgtattagcagaaaaaccgtccgtagcccgggacatagcacgggtgctccactgcaaaaagcagataccgggcgctatggaaggggataaatatatcgtgacctgggcgctcggccatcttgtaaccctggccgacccggaaggatatgataaaaagtacaaagaatggaacatgtcggaccttcccatgatcccgaagaaatgggagctcgtcgtgatcaagcagacctccagacagtaccagtctgtgaaaacgcagctgttccgaaaagatgtatccgacatcatcatcgccaccgacgcaggcagggaaggagaactggtggcccgctggatccttgacaagtccggctgccataagccgctgcaaagactctggatctcttccgtcaccgacaaggcgatccgtgaaggcttcgcaaacttaaaagacggccgggattataacgcgctctaccatgcggccaaaagcagagccgaggcggactggctcgtcggtatcaacgctacacgcgcactgacgtgcaaatacaatgcccagttatcctgcggccgtgtccagactcccacccttgccatgatcgcacggcgcgaagaggagatcagacagttcacgccaaaggaatattacggactggaatgcaccgccggaaagataaaatggacatggcaggagtccaaaagcggaagctgccgcagctttaacaaagattttatcgagaatatttcctcttgtataaaggaagagactttgaagatagaagccattaaaaaaacagcaaaaaaagcattttctcccggactgtatgacttgaccgaactgcagagggatgccaacagacgtttcggtttttccgcaaaagagacgcttaatattatgcagcgcctgtatgagaaccacaaagttctcacgtatccccgtaccgattcccgctacatcggcactgatatcgtaccgacgatcaaagaacggcttaaggcatgttctgtgggaccgtacaaaagcgtggcggggcgtctcataaacaaaccagtgcaggtgaacaaatcctttgtagatgacaagaaaataagtgaccaccacgccattatccctaccgaagaatatgtgcagctggatcatatgaccaatgaagagcgcaagatctatgacctcgttgtgcggcgttttctgagcgtgctctacccgccctttgaatatgagcagacgaccatgacggctgccgccgccggtcagatcttcgccgccagagggaaggtcgtccgttcgatgggatggaaggccgcctatgacgagaaatgggacgacggcgaagactccggagataacactgttgaacctgaacttgcggaccagtctcttcctgagctcaccaagggacagaccttccatatatccgcagtccgggtcaccaccggcaggacaaagccgccggcccgttttaccgaagccactctcctctccgcaatggaaaacccggtgaaatatatggactcctcagatgcaaaagcgagaaagacgctcggggagaccggagggcttggcacggttgccacacgggcagatattatagaaaagctgtttcattcttttttgatcgagaaaaagggccgggagatcgtcattacttcaaaaggcaaacagctacttgagcttgtcccggaggatctgaaaaagcccgaactcaccgccagctgggagatggaactgtccgggatcgccaggggcacccataaagacaccgactttcttcaggatattcaggattatacaaaagagcttattcaggagatacgacagagcggcggcaccttccgccacgaaaatatgacaaatacaaaatgtccgcaatgcgggaaacggctgctggccgtgaacggaaaaaactcccgcctgctcgtatgccaggacagagagtgcggctaccgggagacgatcgcccgtacaagcaatgcccgctgtcccaactgccacaagaagatggaacttatcaagcgaaatgacgaagagacctttgtctgctcctgcggttataaagaaaagctctctgcctttaaaaaacggagagaaaaagaaggcgccggcgtatccaaaaaggatgtacagcactacatgaaagaacaaaataaaaaaagtgaacccctcaataatccttttgccgacgcactggccaaaataaaactggattaaaaagttaaaagaatgtacgccgggacaaaaatgacaaagcggcagaacacgccccgttattttgtcccggcgtctgtatttatttcctgatcttaaagacccagctttcctttataatagctctgcgcgttgtacagtgcggctgccggattgtgtccgagaactctgtctttcgtcactgccgtggtgaccagcgcgtccgagtatttatagaacagactgtcatgtccgacgcagagacctacaactacgttcagatcagtcttttctttgttcagcagttttgcctgaagtaccggattgcacattgccgtgccgactccttcgcatttcttcggaatacctacatctacctttgggatcgttcctactttacagcccacaccatatacttcaaatccatgcttcctgaatattttagccagcattctgctttcccggatgagccctacacatgtggctatcccgatcttatgagccccgatcctgcgggcaaagtccataatttcttccacccttgtatactggcagtaatgttcaaattctacttcagccgccgcaaccatcgttttcttattctcatcttctttatagcaggccatggcatctgccagcgcctcttcgtccatatgcgtggtcagacaaaaagaaggaaattccccgtcaccgtcgttacaatttgtcactgcacagtctatgcaggacagtttctttggtttgtccataacttccacctgttcagggtatgctgccctgtactatcctttcttttctctttttcttattttcagctttaacattgccagcgcttttctcgcatctgtctccgtcaccgtattctccgcgagcactgtcgtctcgtctccggcctgagacgctttatccgacgtcttataaaagcagagcactccgtccatatacttgttctgtacaacaaaatcttctgccggacagagactcagcgctacaacaggaatgcctctcttttctgccgcctcaatagaatgtgcgtaatccacatggttatttccgatcccgttacaggaaaatactgctccgtccgcacgcatacattcaagagataccccgactctctccgcagataaatatttgtcctcattcttatccggtgaacctacgatcatgattcccctgagattaacttcttcatcttccgataagatctctacgagaggatctctgtaatagtgcagcgttgtctccttcatacttgttccaagtcccatggtccgcctcctttacttttccgccgggttctcagtccatggcgtgcatgatgccgtcacggaattcattcggtgtcacaatgacaggcatacatcccatatcgatgacagaatgccctccctcatagccgccgggttcttttccgaacaatctcgtatcatacaccgcgccttgcccggatacttccttcacgatcacgatatcctttcgtccaggttcatatgtctcctggaatacatgcttttccgtgcacttgtaaccgttaaaccgcttcatctgctccctgaatatctgacagaagctgtcgcatgcccggtgtatggcctccggcccggtccgctctgcccacgtattttccttgagcacgacgtcaaacgatatcaagatgtcgctctcaagcggcgtacccgcctgtccccagcttatcttatcctccagaatcccgtcgctggctccaaagttgcacacctgacggccgctttcatctattccggtaagaattacatatacccccgtgagagtgtgcgtgatcccttctcccacctttccaagcactttcgcagacagggggataacatccatgaccgtgttcgtatgctgccggtgctcgtccggccggatgatccgtatctggatatccctgatcaatggttctctctccatcagttccttccctgtctccctgcgcaccgtcatcgttccgtccacattaacccggttctcgtccccatataagacgctgtttacgtggtatgcgcggacggtaagtcttgatcctgtgttcatatactaccttcacctccgtgactgcccctgatcttcatgggcaaaataatatgcgacgatcaaatccaccattttgtcgtagctttccacaccttccttctgtccgttcgctttcagatatgtatcattcacctggtttgccacctccgcgatccttccgtcatatttctcccagaagtcgtggtttgcctgcaggtccggctcaatagcagaagacagcccggcgcggacctcctcgtaagcttcatagtccgccttatgcagtatattcatacagtagatccaccccatgagcctgccgctgtattggaaatccgcacggctggaattcgtgcacgcaagccaggcgataaagttcgcctcctgctcctgcatgaaaccgctcaggtgggacagctcatggcaggccgtaaacggtatgttataagctgtcatggcattgttgtaattcgcctctaccgtaaacggcgaatagataccggtcagattctggacggataatatccacgagttgatcagaggctttgggaccgggtaatgcccagccagctcaggatatgtcccgccgagcccttccatcgcctccacggccccttcctttacatttccgtcaagagtcatcactttatcattcccccggccgactgatccgcttatctcatttacttcatctgtcagccagagacatacttccttcagttcctccgccgtgtattccctcgtcttaagatctgcgctctctgaaaacgaggtgcgctcataatttacgccgcagtttaccgcatatagaaaaaacaatactccgccagtgaggaatactcctgacagaaaccttgacactgcaccgcgccctccctgctttctcagcgctttcagagctgttctggcagccagcgccgccagcgtcacaataaagatatacagtccgatctccgcaagtgaaaacggaaacagacccgccgcccagcctatgacacgcgccagcttcctgtaaatgtgctgcgaataccagtctgccagacccggaaccttcttcgccgcaaataaaagaagcagacccgctgcaaataatatacaaccggccgtcattcttctcatgctgctgtctctatgttttatatccttttctctcataccttccatatgtaacctctcatacccgccttctttcgcagctcctcatatttagtctatcaatattccggcacgattaccagtggaagatatgtgtaataacggaggctgggaccgaagacagccggagtcagtatccggctgcctttaaactgtaatcatcaatcatattttctgatagacatctcgcacactttattcgtctccgggtctatatcgatctcacacagtctgtcataactgctttcatccgcccatgtaaacatatgcatcgactcgccttcgtatgtatccgccgcctctccatatttttccaggacgtcttccttagcggctcctatcgttatccctcctgggaaaagaatatccagtcctccttcttcgagtccgaaatcatcaactgaaatgcctcccacaagacagtccgctgcctttataggctcccctgatgtattgataagatcgaccatgatctcattgcccttcttatcctcaaaatatacgagtatataatcatcagcctctacagccgtatcttccggagtatcttcggtgtccagggccagccccgccgcctcaaggtctgatatactgcatggaaatgttacaactttttcgccgatctgtactgtatagctgtcccagttttctccaagttctttactctgcttcacaggttcagctgctgcctggcctgcatcatccccatcgtcgtcccagtcagaactgttccctgcttcctcagcctctttcgcctccttcggaacttttattttctctgccttatcatattcattgtagacgatctctatgtaataatccttcacttcaaatccttcatatttatcccccataattttcgtgaggatatctttcatgtctacacggatcttagcaggcagaacgctctccttgtaaatgtcgatgacacacggaacttttgcgtcttttatggcatcagcatccagatccatacctgaggtggcggaatcgagcacatcctggtctatgataccgcttaaaatgccgccgtcaacctttccggaaagctcaaaacattttttatcattgacttctacaaggtcctttttgagctcaaatgattcatatgcctccttgagttcttcatacagctcctcgtccagcagattctcccctgcttccgtgatctgttttgtccactcgttctgaacatttaaataagatacgacctcatccttttcctttacctgatacacctcaatgtcggtccccatatctgttccggaaaacttaaaactgattttgccttccatatggcttgcttccggtttctttgtggaaacaatatccacatccagatttaatgccattgtatctgtattatcacccatttcggctgccagcttcatattgcttgacgcggactttatttctgcacagttcttactcatgtctgacaacaggttttccggcgttgcctttttgccgcatcctccggccatcagcaccgcaacagccagcacaagcccaagcagcctgacgttttgtaatttctttttcataatttctcctccctcttttgtaacacacaaatgccttaagataatttacctctattatgccatatatccgataatatgaaaagcacagcagccaaatatttacggctgctgtgctcttacagcttcaaacgaagcgttgttatctgtaatgtccaatattgattttttgccgtaccacatctgatacctcactctgcataccgggctctctctgataattctggacatgcttcctttctgcggcgcgtacaggccaaaagagcgttctcccagttttgtgactttaagaaacagcttcctctgcttcaaatatacttccctttcattataacggacgatccgtgccccaaggtatgttgccatacggtacatatgccctccaagatatgccgcacagatcacgccccgaaagcttctcccccaaagaggcacatctgcggcagacaacataatgcttccctcctgcttcccattgaacaggcactgtgtccaaacgtattccttcgggaaagagtgtccccagtctgtctcaatgtaccctgtcccgcctgtcatatccagcgtcttcccattgacagtcacactccccctggcgcggtgcctcatgctgaccacgccatgattacattccagaaacggaagcagccggaacggtcccataatgtcctttttaagaccagtgaacggcccgtagctgatcccccctcttattgacatttcacggttttttagatctactttaatgccctttttggaaaagaggttatctcctatcttgattctgaaattcttcttatctatggaacattcagagaccgggtaaggaaaattccaagccccttccccggtgatgacttgtacggacgcctcccactccccggtgatccctgcgtgtaccgccgggataaatgctatcatttcaccatttgcctgatgcttcaggtaccatccttcaaaatacggatattttttcattcgtctcctcctcccgcagttatgtctttctgcgcagggccgtctatcactcttcccctgcagtcaaatcttgagccgtggcatggacattcgtacgtcttttcttccggattccaggacaagtggcagcccagatgagaacagcgcgtagtcctcaccttctcctttttatcttccggaagtccggacggctttgtcagagtaacggctgtatgcccgctctctttgcatacgtttcctgcggcgtcctgcccaatatgcctttggggagaaaatacttcttcatgacggtttttctcaccggttatcatatcagaaagtatcatggcagagaccatagaagacgtcattccccatttttggaatcctgtcgccacaaaccagttctgtttccgcctgctgtatctaccgatataggggactttgtccagtgtcatacagtcctgtgccgaccaccggtatgcctctttgctgtccggccaccatctggccgctgcgctctttagtttcccgtactggccgccgcacgtatcctctcctgtccggtggccttctcctccgataagaagcagttccccggctgttctcagtgaaaggctgtcctggtcaacgcccagatataccccatttaacggaggcgccccttttaccgcaactacataacttctctcctggtacattctcataaaataatatcccggtatatttacaaacgggtaatgacatgcaaatacgatattggctgcctgaacgttgcctttatctgtctcgacgccattatccgtgacttttatgaccttcgtattctcaaatactgtgacctcgtcggagaccgcctttagaaactttatcggatgaaaccgggcctgcgcgtcgaaccgcagggctccttctacccgaaacggcagctccgtatcctcggtccacctggccggaatgccgagatgcagcgccgccatgtactcattatggagttctgtcttctttctgtctgcgtacagatatgccggacattccttccagtcacagtctatcttattctgccggatcaatgactcatattctctgatggccgcctcattcgcctgggcatactgcctcgccagaacttctccttttgtctttatcagatctgcgtatatgagattgtgctgggatgtcactttcgcggttgtacatcccgtctgcccgcctccgatgcgttccgcttccagtacaatacattccctgccctttttcttaagcaaaaaagcggtcaggatgcccgccattccaccgccgatgatcactgtatctatactgatgtcccccgcaagcggattgcgcgcaggaattgatactgtctcattccagtacgactttttctgcatattattcacctcccgtacaggatgccctgtttctggaaaatttatgtatgcgccgcaaaagccagacggataaatccgtctggcccctatatgaacaggcagttatacgctcactgcccgcaccgcactctatacgttaaaaagatcgttcagcgcttctcccatagtcggatgcgtaaatatcatatccttcagcaccgtataatgaagatctgcatccattgcaatcttcacaagattgatcaattcatgagattcctcgcaaaagagatgtgctcctaatattctgcctgtgtcttcatcgatcaccgccttcaggagcccttccggctgccttaaaacctgcgcttttggtattgcggcagccccgagacgggctgtctttactttatggcccgctttcaaggcttcggcttcactcatgcccactctggaaaatggaggattcagaaatacactgtaagggacagcccctcttttatcaagagtatagcttccgtctcccattatctttgagcgcacgatcctatagtcatccaacgaaatataagtgaactgcagccctccgactacgtcgcccatggcgtaaatatggggagctgtcgtagttcttgaatcatcggttatgataccgcctctttcatttacctgaacaccggcggcctccagattaagccccttcgtatttggccttctcccggttgccgcaagcacggcctctgcttccaggagatctgtaccctctttcgtactgatcactacttccgcatgaccggccgcctctttcacttcctccacctttacctctgtgagcacgcgtactccgcggcgttccaggctgccgcgcacttccctggctatctcctcatcttcccgcggcaggaacactggaccgtcctgaaggatagagacctttgacccgaagtccgcatagatagaagcaaattccactccgatataaccgcccccgataatgacaaggcgctccggcagttcttccatatccagcagtgtttcactcatatatacgtaaggattattttcaatacctttcacaggaggtataaacggcacagaacctgtattgataaaaaattgttctccggaaacgatcaatgtttcctccgcagtgtcaacctcaacctcgtgcggagaaacgaatctggcctttccgtcaataacagttatattcggatctcccgccagtttttgatagttcttccctctcagcttttctacgagctgcgcttttctttgcaccgcctcggcatacacttccctgccgtccctgcatccgaaagcagcctcttttgcgctgtttacgagagatttggtcggaatacaaccgacattgatacatgtacctccatacatcttcgttgactgttcaatcatcgcaaccttttttccggcgctgcccagggcgccggctatcgtcttcccgccttttccaaaaccgatcacgaccgcatcataactttttctcttacctgacatggcaaacctccacaatatatgtaattttattagttacagtttatactgtaactatatcatgtacagttatccgtgtcaagctattatttattccatgcgcgtacatatacttttacccaaagtatttgactctatggcctcctttccctatcatataaaaaatgcatgaaataaattaaacaaatagccgacaatgacgattcccattgtacaaacagcaataaataacgcaagcaatttaggtttaacagccttcctcagcatgatcagcgacggcagactcaatgttgtaactgccatcataaaggccagtatcgtccctaactgcgcgccttttgaaagcagcgcttctgctaccggaatcgttccgaaaatatctgcgtacataggaattcctactaatgccgccaaaacaacgccaaacggatttttgctgcctaatacggtctctatccagctttcgggaatccagttgtgaataaatgcacctatgccaactccgatcataatatacggaaatacctgtttcaatgtttcaatcacctgtttcttagaaaactgtacccgatctcgttttgttaaagtcgttgactctatatccacgctgtcttcctttttgataaaatcttccacatatttttccatatgaagcttttcaataaatatgccgcccactactgcgatcaccaagccgactatgacataagcaaccgcaaccttagcgccaaatatacttatgagcaaaacaaggctgcccaaatctaccataggtgaagatatcaaaaatgaaaaggtcactcctaacggcaggcccgcgctcgtaaagccgatgaaaagcggaattgacgaacaggaacaaaatggagtcacagtcccgagtaaagccgaaactatatttgcccagataccatcaaaacggcccagtatctttttactgcgttccggtggaaaatagctttgtatatacgatatgataaaaatcaatatacacaataatacgcttattttaattatgtcataaataaagaagtggatactggcgcccaccttagaatcaatgtttatgcctgcagaaatgagtatcttttgaataaggtcatttaaccatttcattccaagtatctcgtcctgaataaatagaaaaatgatttttaaagtttccaatgttattacctccatttattctttatatcgaattttttcgatgttaaatacttaataaaagtcatctcgtgatgactttcactttgtattacttatttcaggtgttgttattttcaaaagtctttctaatgcatatctgcttcctgactcgctgagtctgtaatatgtccattttccctcctgccggctgacaacaataccggattcgcacaatattttcatatgataagaaagtgtggattgtcctatactcatatcatcaattaaaacacacgcacacttttctccacttctcaaaagatttaaaatctttagtcttttttcatcgcaaagagctttgaaaattcctgcgtctttcgtatattcattattcataacagcacctcatatctattattttcgatatgtttatgatacagcataaataattatacgtcaatatacatatcaacttttttgaatatgttttatgtatcccatacattacatttcacttccgtttaatagttaagtaaataaaaaaaatcctgcaagcataaatgcttacaggatcttcacagctccccgagttgggcttgaaccaacgacccttcggttaacagccgaatgctctaccactgagctatcgaggatcactatattattatatccccttacatcgaacttatgcaagaggttttatttatgtaccctgaaaactgcatacaagaaataattcatcctttacctatccaccttctcgcttcgagatgcgcctccgtcatttctgactccgcgctctcttcactcttggtcatgccctcgaccgattagtagcagtcagctccatacattgctgcacttccacctctgccctatctacctcgtcgtcttcaaggggtcttactgcttgcgcagggatatctcatcttgaggggggcttcacgcttagatgccttcagcgtttatcccgtcccggcttggctactctgccatgctcttggtagaacaacagatacaccagcggccagtccatcccggtcctctcgtactaaggacagctcctctcaaatatcctacgcccacgccggatagggaccgaactgtctcacgacgttctgaacccagctcgcgtaccgctttaatgggcgaacagcccaacccttgggacctacttcagccccaggatgcgatgagccgacatcgaggtgccaaaccactccgtcgatgtgaactcttgggagtgataagcctgttatccccagggtagcttttatccgttgagcgatggcaatcccactttataccaccggatcactaagtcctactttcgtacctgctccacccgtcggtgtcgcagtcaagccctcttttgcctttgcactctgcgaatggtttccgaccattctgagaggacctttgagcgcctccgataccctttcggaggcgaccgccccagtcaaactccccacctgacattgtcccccagccggttcacggctgatggttagaaatccaatactgcaagggtggtatcccaacagcggctctgtgacgactggcgtcatcacttccttgcctcccacctatcctgtacatgcaataccgaatcccagtatcaagctggagtaaagctccatggggtctttccgtcctggcgcaggtaaccagcatcttcactggtatttcaatttcaccgggtgcattgttgagacagtgcccaaatcattacgcctttcgtgcgggtcggaacttacccgacaaggaatttcgctaccttaggaccgttatagttacggccgccgtttactggggcttaagttcaaagcttcgcttgcgctaacctctccccttaaccttccagcaccgggcaggcgtcagcccatatacttcacctttcggttttgcatagacctgtgtttttgctaaacagttgcttgggccaattctctgcggccagatctctctggcactccttctcccgaagttacggagtcattttgccgagttccttaacaatgcttctcccgtcggccttaggattctctcctcatccacctgtgtcggtttacggtacgggcacgatataaacgatagcggcttttcttgacgcatggctcacatacttccctactttaagttcggtacgcatcacggatttggtttgcacaccggatttgcctgatgtacgcctaccccgcttgcgccggtctttccattcccggcttatgctttccacacgtgtccccacagttctgttatatcgtggtacaggaatctcaacctgttgtccatcggctacgtctttcgacctcgccttaggccccgacttacccagagcagatcagctttactctggaaaccttagatattcggccggaaggattcccaccttcctctcgctactcattccggcattctctcttcgatgcagtccacagctcctttcggtactgcttcttcccgcatccaatgctcctctaccgatgtacttcgtacatccctgagcttcggtagtgtgtttcagccccggacattttcggcgcaggacctctcgactagtgagctattacgcactctttgaatgtatggctgcttctgagccaacatcctagttgtctttgaaatcccacatccttttccacttaacacacattttgggaccttagctgcaggtctgggctctttccctttcgactacccaacttatctcgtgcagtctgactcccatacatcatctacgcggcattcggagtttgatattcttcggtaagctttgacgccccctaggaaattcagtgctctacctccgcaagacttgtatgaggctagccctaaagctatttcgaggagaaccagctatctccgggttcgattggaatttctcccctatccacacctcatccccacccttttcaacggatgtgggttcggtcctccattgccttttacggcaacttcaacctggacatggatagatcacccggtttcgggtctactctgactgacttatacgccctattaagacttggtttcccttcggctccagaccttgagtctttaaccttgccagccagcgtaactcgccggaccgttctacaaaaagtacgcggttcaccgcataagggtgttccacagcttgtaaacatatggtttcaggttctctttcactcccctcccggggtccttttcacctttccttcacagtactatgcgctatcggtcactaaggagtatttagccttacggggtggtccccgcgcgttcccacaaggtttctcgtgtctcgtggtactctggataccgccatgtcagtcagactttcgcttacggggctttcaccctctctggccggctttcccaaaaccgttctgctactcttcctgaatcaattgtgcggtccgaaccccagggtgcacgcaccctggtttgggctcttccgttttcgctcgccgctactcgcggaatcacatgttgttttctcttcctccggctacttagatgtttcagttcaccgggttcccttccttacgttatggattggcgtaaggatagctgaggtttcctcagctgggtttccccattcagatatctccggatcaaaggatatttgctcctccccgaagcttttcgcagcttatcacgtctttcatcggctcttagtgccaaggcatccaccatatgctctttttagcatgaccaacgtgctcaggagatacgggtgtgtctccctcgctacacatatctagcgtgatatgcgttggtttcttaggtttgtttttttgattcgttgtctcgaatataaataatgttttctcaccggacgtaacgtccagtaagtctttcattacctcggatgtcttgattaaataagatatttaatctttatttctttgtatgcaattttcaaggtacatagagactgaatctttatcagtcattacataagaaaatggcttttcttatctaatcactggtaaaaccagttatctgaacagcactgccctgctgactgggttggcggtgataagttgttgctcatctttgcctgtatttatctaaatcccgaacatttgcagcggttctgcatctgctcttttttttagtgctggcagccacctgctctcccacaccgtctccagtgcagtaccatcggccgcctgagccttaaccatcgtgttcgggatgggtacgggtgtttcccccaggcgcatcgccaccagcagtcctttttaaacttttgaaggcttaaaaaagctcttttccttgataactaaacaataaacaacaacccctacttcttcttttccttagaaaggaggtgatccagccgcaccttccgatacggctaccttgttacgacttcaccccagttatcggtcccaccttcgacggctccttcctttcggttaggtcaccggcttcgggcgttactgactcccatggtgtgacgggcggtgtgtacaagacccgggaacgtattcaccgcgacattctgattcgcgattactagcgattccagcttcatgtagtcgagttgcagactacaatccgaactgagacgttatttttgggatttgcttgccttcacagggtcgcttccctttgtttacgccattgtagcacgtgtgtagccctggtcataaggggcatgatgatttgacgtcatccccaccttcctccaggttatccctggcagtctctctagagtgcccacctcaaatgctggctactaaagataagggttgcgctcgttgcgggacttaacccaacatctcacgacacgagctgacgacaaccatgcaccacctgtcaccggtgttccgaagaaagagtacgttacatactttgtcaccgggatgtcaagatcaggtaaggttcttcgcgttgcttcgaattaaaccacatgctccaccgcttgtgcgggtccccgtcaattcctttgagtttcattcttgcgaacgtactccccaggtggattacttattgcgttggctgcggcaccgaaaagctttgcttcccgacacctagtaatcatcgtttacggcgtggactaccagggtatctaatcctgtttgctccccacgctttcgagcctcaacgtcagtcatcgtccagcaagccgccttcgccactggtgttcctcctaatatctacgcatttcaccgctacactaggaattccacttgcctctccgacactctagcctgacagtttccaaagcagtcccggggttgagccccgggctttcacttcagacttgccatgccgtctacgctccctttacacccagtaaatccggataacgcttgccccctacgtattaccgcggctgctggcacgtagttagccggggcttcttagtcaggtaccgtcatcttcttccctgctgatagaagtttacataccgaaatacttcatccttcacgcggcgtcgctgcatcagggtttcccccattgtgcaatattccccactgctgcctcccgtaggagtttgggccgtgtctcagtcccaatgtggccggtcaccctctcaggtcggctactgatcgtcggcttggtaggccgttaccctaccaactacctaatcagacgcgggcccatcttacaccaccggagtttttacccctctaccatgcggtactgaggtcttatgcggtattagcagccatttctagctgttatccccctgtgtaaggcaggttgcccacgcgttactcacccgtccgccactcagtcaatacaaagttctgatcttagcaagctaatctcttcacacagtattgcttcgttcgacttgcatgtgttaagcacgccgccagcgttcatcctgagccaggatcaaactctcgttaaaagtgtttaatcgcggtcaggattaactactagctaatcctatcccgttattactgttttttaggttgacatcttttttgatgtccgttctgaatttttctctatttaagaaattttcagggttgttgtctattgtttaattatcaaggttctttgttgtttcgcttcatgtcagcgacaacttttataagataccatatattggattgttttgtcaacaccttttcgatatctttttttgttttttaagcgattctactgattctcatctgcttgtcccgcttaaaaatccaccacgttcccgcggtggagtttaataatagcatttttcatttttaaagtcaagggattttatcccaatttatctaaaaattgtggcaagcttcattattgggttatagtcatacaacattttcagcaggctgttgctttcgatcatatcgaacatctgctttccgatgtccgtcgtataaagcaaagttataataacaaacaatgtccatacgatgatcagggcgcctgccgccccgaccgcccctcccgccagacggtttacagcgccgagtaccggcagctcagagataatgtcaagcgcgaatacgatcgcccgtattattatggtaactaagataaaggtacacagaaacgcgataatgttgattataagcttcgccagaaaatgtccgacatactgggcaaacgtctccacccccagctccttgtacatatcactgttattatttgtcgtcagcatatccttaaacaattccgggagatctgctttatcgatcgccgcaacctgaaggtcccgtgggatgtccgcattatttatcgcatcctccacctcttttttcttttccccaccgagccccttcagcagatctccggatatcccatatttctctaaatctgagcttttgatcttgccgtccacaatatcctggatcgtaaccccatactgagacagcatgtcctctgtcaccccggctgcatttaacgcttttctgacatcctcctccgtcagcccgccggtgtcgccgtccgcaagctgtgatgccgcggcgccggccatcgtactgatcacctggtcctcgatcatttcatcaagaggagtgtacttcgttatcccctgagctacaaaaggcgtggcaaaataaacgagcagcaaagtaagcagggtggccgccagtgataccgctattttgatcgctcccctgcagattcccactacaatacagattagaaatattactcctgtcgctattaatatccagttcatgttttctccttattttacaagccggactacttccattccgtctgcattcatcacaatgtatttatttactcctgctatcgggaacatctccattatattggacttcagctctccgtcaaactttttgactccggtcctcaaaaagatcgtgcactttttgccgtcatacatgatcacctggcttccgctcagcttcacctcgctgtaatccccggtaaaatctttggtcattatctggcggcctttggcattataaagccggagctcatacccctctttgccttcgtttttaagaaccatacctatatatttctcattgtggaacacgctttttatttcttttttgatcctgacgctcacctgttcctccggtttgtccagtcctttatatataacgagcctgtcatcgcctacgaccgcagaagtcttccctttcataaaaaaggccgacggcatgatcgttccttcatattctttggacgctacctggcggtccgctttctcctcccctgcctctccaaaattataatatacggcctttgacgttattttgccgtcctgcgtgtacaggtaagatacgagcatgacttctccgtcctccgacagcgccacatcaacaggataacctgcccctgccagagaagcctttatctcaacgagcacatttcccgctgtgtcgtagcatattactttcggggaagattcgttttttaatatcacactcacgatcccctgccctgacactgacaccttctctatcggcaatgttgtgtggatctcccctttcagcccgtcctttttgaaaaccataatgtcgtttccgcctttatcggcaagagcggcggactcctggcacacgtctataaacggatttttgatctggtacggctggttccattcttcctcccctttgtggttcagatacgccacgccgtctctgctgtacttgagcactccgtccgcgaattcttcatagctgttgttggcagcccctttgatcgtataagtgtcgctgactctggcctcagtgtatgtctgcagatgtatgaggaggtagatgccgacggccgccgccacaacagccgctccggctattatgatacgccgtctgaatcttattttatgctgtttgatctgtgcctccatattttcaacgggattgtcttcactgtttaactccgtcattatctggtcaataattgcatctgtcggatctccagattcacttactacacgcaagtttttatttcttctgtgtaacatctgtatctccttttgtcttgtcatttgtgttcagtatatcatattttacttctatggtaataacaatttttgtccgatgaaaatgaggttgccgtcagacagtccgttcatcttgcagatcgcctccacgtgggaggtatttccatataacttcacgcttatactgtccagtgtgtcgcccttttggactacatagtagtcttcatcgccgagctgctcctgaatagtagaagtttccggaaccgtgcctccggaaacttctttatcttttgcgtctgtatcctcagccttcgtatcatctgcggcagcatctttatccggatcttctccctcgttttcgttgacggtccctgtcttgctctccggtttgttcactgactgtgacaatgactccagcgatgtctggacagcttccattttatcgaagttattaacggttgagataccaatcgccagtactactacaacaagcagtacgctcgtagcgtaagtgaatttggaactgcctttctgctctttatattccatcttctcccttactgcactacgaaaatcctttgcagctcgatcctcaaccacttcactgggtgtaacgccgatctttttacgtgtatttatcatataattctgcatggaaggatttttttcatagtaaatatagtgtccccccatctgcatcagctcatggtatttataagcataatatatctcgtccgtctccagcgcgtctttccagataaatatgctgttttccgtggaaaacgaagcctcgtgcactttctttacgccgctgttgagccccatgggatgtccggtctcgatcaggcaccagcccaccagctcttttgacgggaagtattccttcttatcctcctccagctgtttccatgtctcttcttctatgtttatctccgtccctttgacttccagctctttcatctgtatcgcccctgatatgtagaccacattctggtcttccagagactggatctctccgacaagggcagcccctatggctgtctctgccgctttctcacgcagttggctcaaataggtgtctacatagtcttctacatatatcttaggctcatcgctgacgttccctatctgccttacattcttgggaaattgtttctccatatactctcacctcatctgcatatttttgcttatgatagcatatggatcgtgcgcattttatcatatgatgggacttgtccaatgaaatttccggcatgttacggtcatttccttttattttcgacggcttgtttcacaggcgccgcaatacttgtctgtaacggtcgtaacccatccttcttttgtccttggaaagcggaaaaatgtcaccggccacatatgattccgtataatatctttctctactttattcagtttgtacagccttgaagcatttttaaatgacacatccgggtgtgtcagtccgtgaaacttgtcaccggtccttgcggcgtgtgtatgccagtcgtacaggaacagatcgtgcagcatgccggcgcgggccgccgactctgcatcaagatgaaagaaccggcaccactgatagttgtagtaggcaacgttcatgcagtgctgatagcagttcgtgttcccgtggtggggatacagcttcattctaagcaccaccggatgcctggccacatcttttatgctgtcgtaaaagtcgtccttccattcccggcgcagactgtgcagtttttttatcattgctttttttatgtttaacatatcagctctttctgttactcttaaaaaatataaaacaaatagcctgttttgatttttacattttatattctaccttttccgccttatctttgcaatacctagtcctcgctgttgtcctcgccatcagattccgtgagcaaatcacccgtacttttatagcgtttgctgatcatactgtaatatacatctctaactgaaggcggatagcgcagcactttatacttcctgctgtattttccggcctgcctcgctttagaaccaaaatccacagtccttccaaaccgtttgatcaaaaccttcctgcactgcgggcaggcggccttatcacaggcatggcatatgtatttgaggtgccctctgtgtttatcgcggtaaaaggacatatttaattccgcgtgcgccactgtcccgtggccgataagatatcccatctcctgcgctttctgccggcagaagcgcggtactgcgcgcgcgttggcaaatacgatcttaacaaagcctctctttgtctgaaactgagagcaacagatcgtctttgccgaatgacctcttgttattaccttgtccgccggatcatccgctttgcgcatagtctcgcgatggattatttctgcatctccttccagctctgttacgggaagaggggtatcgtaaaacgtgaccgcattagatgtgtgtgattcttccagggaggcggactgcgtataatgatctgcaaaatcatcgtcagattctgaatgaaaatctgatagttcatcctttgtatccggcgcttcttcttccatttcttcctcgtctgccggtaccatcgatggtattcttatgtcttccgcaaattcctcttcttccgccatgtcttcaaagggacgtgattctccctctcccgcagacggacttggccatatccccagcttcgaggccgctataataacatatgtggcatcagcaaatgagtatctgcttttcatgaggttgtaaactccgcggacagaatcaagtcccttatcgtcgtcatttccatattccatgccgtccagcagctgcatcagcgcctctacagttacgctcacatcatgtcccatcgtattcagctgcctgtccctcaccatgcactgccttattgcatctaatatgttctcatcaggtgtaagttcatcgttatacggaatttgtttgatgtggcgccactcattaaactggtctctgttcatctggatcacatgatctttaaatttcagccccgtttttttactctgctttttcctctgctcatagacatacatacgccttcctcctatcgtacaagcgcaatactgaaatgaataaataccatattaaatgtccccttacattttctcaaggttttaaaagggacatggcagtatcattctctctgccatgtcccttattcttccgcttaaatatttattttaacagaatgcttttactttctcatagatgctgtctgcgtccaggccgtatttcttcaccagctctactgccgggcctgattcgccgtatgtatcattgataccgatcttcaaaaccttggcgggcgccttctcagccactacatcgcacactgcgcttccaagaccgccgataacagaatgctcctctacggtcacgatcttgcctgtctcttttgcagcctctgcgatcagttcctcatcaagaggcttgatcgtgtggatgttgataacctttgcgtcgattccgtctgccgccagcttctcagctgcctcgagacagtttgataccggaaggccggttgcaacgatcgtcacatccttgccttctctgagtaccacgcctttgccgagttcaaatttatagtccggcttgtcgttgataaccggaactgccagccttccgaatctgaggtacactggtcctacgtgctcataagccgcttctaccgctgcttttgcctccacatcgtcggatggattgatgactaccattcccggaatcgttctcataagcgcgatatcttcattacactggtgggtcgctccatcttctccgacagagataccggcgtgagtcgcaccgatcttaacatttaacttcgggtagcctacagagtttcttacctgctcgaacgcgcgtcccgccgcaaacatggcaaaggaacttgcgaaaggcactttccctgtcgttgcgatccctgccgccacgccgatcatgttgcactctgctataccgcagtcgatgtggcgctccgggaacgccttcttaaatgtacctgtcttggtagccgcagcgaggtcggcgtcaagcacaactacgtcttcatgtttatttcccagttcaaccaaagcattaccgtagctttctcttgttgcgatcttctttacttctgacataatgcttcacctgctttctctaaatctgccatagctgttgcatactgctcatcatttggagctgccccgtgccatgacgcctgattctccataaaggatacgccttttcctttaactgtcttggcgatgatggcggtcggctgtccttttaccgcctttgcctctttgaatgccgcgtcgatcgcatcaaagtcatgtccatcgatgttgatcacgtggaaattaaatgcttcaaacttcttatcgatcggatatggggaatttacttcatcaatcgccccgtcgatctgaaggttattattgtcaacgataaccacaagattgtccagttttctgtgtgccgcaagcatagccgcctcccagacctgtccttcctggatctctccgtctccgagcagtgtatatactctgtagtcatcgccggaaagttttgcggacagcgccattccgactgccgctgagattccctgtccgagggaacctgatgacatgtctacgcccgggatatgcttcatatccggatgtccctgaaggtaagaacctactttacgcagtgtcttcaggtcttctaccgggaaaaatcctctctgtgccagtgtggaatagtaacccggcgctgtgtgtcccttggaaagtacgaaacggtctctgtccgccttcttagggtctttcgggtctatgttcatctcttcaaaataaaggtatgtatagatatctgctgctgacaacgaaccgcccgggtgtccggatttggcgctgtgtgtcgccgttaccacgcctttgcggatttcgttggcagtcttcattaactctgatttattcatgaaaattgcctcctgatttttatttattctccaaatacggctctgtagtctgcctggaacttttcaatgcctgcgtctgtgagaggatgctttgtcatctgctcgatcactttgtacggtactgtcgcaatgtcagcgcctgcaagcgcacagtctgtcacatggatcgggttgcggacgcttgccgcgatgatttctgtatcgatcccggataccgcaaagatctctgcaatttcactgatcaagtccacgcctcttacgttgatgtcgtccagacggccgaggaatggtgacacgtatgccgcgcctgctcttgcagccagaagcgcctggtttgcattgaagatcaatgtcacgtttgtcttgataccttcggaagaaagaactttacaagcttttaagccttctactgtcataggaatttttactaccatgttcggatggatctttgcgatctcacgtccttccgcgatcatcccttctgcgtcaactgtcgttgcttttacttctccactgatcgcgccgtccacgatagatgcgatctcagcgataacttcttcaaatactcttccttcttttgcaatgagagaaggatttgttgtaaccccgcagatcactcccatgtcatttgcttttttaatgtcttctacattcgctgtgtcgatgaaaaatttcattcttttttcctcctttaaatatgtaattcctacacatgttcgctactttttgccacatgataaaattatatctcatgaggggattatcggtcaatagctttaaattttattagtaattttttctgctaataatttaatattattaattgtatcatcgtgtattattaaacaatccaaacatatttccggcatttttaccgctttttcggttattgcatggtatatcatcagataattattaataataatttctctgattacattaatttattttttcttacgtcttcttacataagatgtagtccctctcacaatgagctttggctcatattccacatgataagtgctgatcggttcgatctccgaatatttcgagttatgagaggctattttcttcataataatgtcgcaggcgtcccggcctttaaatatgacgaaatgctcgatcgtcgtcagcgccactttatgcatgcgcgcaaaaagtgtattgtcgcatcccatcacggacatgtcgccgggaaccttgatcttggcctcgtaaagagcatccagaattccaaacgcgatcatgtcattgagccctactatggcggtaatgtccttcgtctcgctcagcagctcctttgtcaggtcataaccgatcttatactcagaatcgatatgggcgatgtccagatccagttcttcctttgccgccttgataatgacattttctttaatgcccgcttctgcaaactctttcaaaaaaccttccacccgtttggagcgctgcttctgcctgactgtcagaggaggggcgatgtaagccacattccggtggcccagctccagaagatggcgcgccatcatacggcccagcttggaattgtccagttcgaccgcatccacattcaatttctcattctggttgttgatgatggcaaccggaatatgcacagacaattcttctaccagccccataaagcattcactcggattgcacgtgtagatgatccccagcggccggagctcccacatcatcttcagataccgctcttccatccgcagatcccgctgggtgttgcatacgaacaggccgaacccctgctccttggcacgggactctatcccctgcagcagcatgacataataaggatttgtcagattggaacagaagacgacaagaagcctttctttccggctccctctgcggctctttctgcccggcgccgcataaccaagcgcctctgccgcctcctccaccttccggaccgtctccttagaaaaagatacattatactttttattcagcaccatggacaccgtcgactgagatacccccgccgctctggcaatatccgtagatgtaaccttcttttttcccatatcagctctccatcaggttttaattggggacgttttaattggggacggggtttttttagatttcccccgtccccaattacgttttgccctgtccccttttagatttcggttcttccttccagcgccctcagcagggtcacctcatcgatatattccagatcgcctccgacaggcactccgcttgcgatacggctgacttttatccctgtcggcttgataagcttgctgatgtacatggcggttgtctcgccctccagactggaatttgttgcgattatcacttcgtcgacatccttgcgcagacgttccatcagttctttcagcttaacgtcctccggaccgatcccaagcatcggtgagatggcgccgtgcagtacgtggtatacgccttcgtactttccggtcttttcgtaggcggccaggtctcttgtcgtctccacgaccatgatcgtcttatgatccctggcttcattcctgcagatcggacagagttcctggtctgtcagtgtatagcactcggagcagtagcgcacattctccctggcctccaccattgtatctgcaagtcttttcacctcttccacaggcatatgtatcaagtgaaaagccagccttgacgctgactttgtacctatgccgggcagacatgacagttcttcaattagtttactgatctggttactgtagtaatccattcttttcgctcctgctagaataatccgggcatctgtccgccgcctgtaagtttggacatggcagatgcggattcttcttccaccttcccgatcgcttcgttcactgctgccacgatcaggtcttccagcatctcaatatcatccgggtccaccacttcttcatccagttttaccttcagcacctgccttgtgccggatactgtaacttctacagctccgcctccggctgaagccgtgaattccttcgtctccatttcctttgcctgctcttccatctggcgctgcatcttctgtgcctgcttcataagattggccatattgccaggcattcctccgcccggaaatccacccttttttgccatgatataattcctcctgtcttttctgttatttttaatattattcgtcttctacagttatatccatgtggataagcttttctatgtccacaaagctgtcttcaaactggcgtcccgtctcaacaaaccggacttccagcactatctttttcccgatcctgtcctcaatgagctgttccacctctgccttgtgcgcctcggttcccactacacccgcgctcacttcatcggggagcactatgagaagccggttaccttcgcccgcgcttagcctggcccgtttcagatagttgcgcagcatgggagacgcctcgtttgcgattccgcggaaatcctgtgccactgcttttacatcctcattcagcgccgccggaagctgcggttttggcttctgcgccggctgtgcggcttcgtctgcatttacatagactactttttctttcacttccgccgccggaagcccctgttccagctgcttctctattgcccggatacggtcaagaagcgtatccggcttcgtctccatagccggtctgcataatttgatgagcgtaacttcaagaagcactctcttctgagtcgcaaacttcagctgatttgtaagttccgagaaaattctaatatagcggattaatgtgtcgttgtcaatcatctgtgcctcttctttgagctgaatgagattttcggtagacacatcgagtacatcctccatattgtcggagcctttcacaagcaataagttcctcagataccacgtaaaatcggccgccagctgcgacagttctctcccctgcataacgagctcttccaccgtctcgatcacctgatggacgtccatgtcaagcagctccctgagcagacggctgaacacctccgtatccacagctcccagcacctcaagcacatggtcatacgtaagcctctccccgatataaaacgcggcgcactggtcaagcagactgagcgcgtctctcatggaaccgtccgccatccttgcgatatagcgcaccgccttctcttccacatcccactcttctttttctatcaattcccgaagccggccggatatggtctctatagagatccgtttaaaatcatagcgctggcacctgctcaatatagtgatcggtattttatgcgcttcggtagtagccagtataaagatcacatattccggcggctcctccagcgtcttgagcagtgcattgaacgctccgatggagagcatatggacctcatcgataatgtatactttaaagcggccttccgtcggcctgtatgcaacttcttcccgtatctcgcggatattgtccacgccgttgttggaagcggcgtcgatctctatcacgttcatggaagtccctgaggcgatcgtacggcacatcgcacattccccgcaggggcttccgtcaaccggatgctcacagtttaccgcttttgcaaatatttttgcaaccgttgtcttccctgtccctcttgtcccgcagaacaagtaggcatgtccgatacggtccgcttttatctgatttttcagcgtcttgactattgcatcctgccccttaacatcttcaaattcatccggacgaaacttccggtataatgccatgtatgacattttatctacactcctgcctgttttctgtttgttgtctatgcatccccgaaactgatccctgtaagctttgcttctttaatgatatcacttgtcggagttacatattttagttttcctgcaacctcggccagcggaacacggacagtctcattattcctcaccgccaccatgttgccgaaatctccatccatgatcgcctctgccgccgcagcgccaagcctcgtcgccagcacacggtcatacgcgcacggtgagccgcctctctgcgtatggcccggcaccgtaatacgaacctcctggtctgtctttttctggatcttctcagaaatctcataagccacagaaggatatgaattcttcgcctgcttagccttaagctccttcttggaaaggcttgcatcttcctttgatatggcgccctcggctaccgcaatgatcgtaaaacgctttccggcgtctttcctcttattgatcgcatccactaccacatcaatatcatacggaatctcagggagcagaataatatccgcaccgcccgcaatacctgcatgaagcgtgacccatcctaccttatggcccataacttcaataataaacaccctgctgtgagaagttgcggtcgtgtgtatccggtcaatcgtgtctgtcgcaatgtcgaccgcactctggaaaccgaacgtcatatccgtcccccagaggtcgttgtcgatcgtcttcggaagcgttatcacattgagcccttcttcgcgcagcatatttgccgtcttatgagtcccgttgccgccaagcacaacaagacagttcaggttcagcttgtgataagtgtgcttcatggcctctactttatcaagcccgtcctcatccggcacccgcatcatcttgaacggctgcctggacgtcccgagaatcgttcctcccaaagtcagtatccctgaaaaatctttggaagtcagcattttaaaattagaatatattaaacctttataaccttcctggaatccataaatctcaacattctgtatcttagaacaaattcctttgaccaccccgcgcatggcggcgttcaatgcctggcagtctccaccgcttgtaagcattcctattcgaaacatatacccactcctttctgtgcatacttataagtattataacccatttccggcgcgaagacaattagggacaccctgaatttggctggggacgggggaaatttaaatttcccccgtccccagccaaattcagggtgtccctaatcgcatataaagtgctataatatagcatattgtatattatgaataaacagaaagcagggaaaatatggataaactagatatcaaactctggtcgctcgctgccaaggggcagatcgtaccagaccgttctcttttaaaaacgccggatcagatcgaggccatcaaaaaaagcgctgctctgaatacggcagtgcttgatcatgttgcggctcatatttgtgaaggtatgaatacagcagaaatcgaccggctcgtgtatgactatacaacggcacacggcgggattccggcgccgctgaattaccaggggttcccgaagagtgtctgcacttctgtcaataatgtcgtctgccacgggatcccggatgaaaatgagattcttaaaaatggagatattattaatgtagatgtgtccacgatactggacggatatttttccgacgcctccagaatgttcaccatcggcagcatctccgggcgcgccgcaaaaatcgtgaaagtgacagaggaatgtgtagaactcggattaaaggaagcgaaaccgtggggccatctcggcgatatcgccagtgcgatcaacacacacgcccggcaaaatggctattctgtagtggaagacatcggcggtcacggaatcggacttgaattccacgaagacccatatgtaagctatgtcacgccaaagggcagtgaaatggtgctcgtccccggaatgatgtttacaatagaacctatgataaatgaaggcgggccggacttttatgtagatgataaaaatggctggaccgtatacacaatggacggcggattgtccgcacagatcgaatatatggttctgatcaccgagaaaggtgcagaagttttaacccggtaaaattatttcttaccgggtttttttctcagtttcagctctatattctgcccgtctgccgtttccctgaataaccgcactatacaggcagccttttcttttaattctgatccgtcctgcttagtctccgcctcggcctgctctacgatccgtcttatatcctgcagttccagaagattcacggccacacagaaaaaattcttgcgcctcccgtcgttataattctccagcagaaagcggagtatgcgcactttctcttcctgctccgtcacatagagatccacccctgcctgctttaacttctgaagatctttcctcctgttgcggtgcgtgataaaggagtcaaattcatcgatgccttcatacttaccgcacggataactgccgcattcacagcaatattccaccttgtcatgggacaggctgcattttgctatccggcatgactgattgccctctccccctccgcagccggggcagtgatcccccagccgcatagggcaaagaccacagttcagcccgcagagcgacaacaataagttatcccttttaaaatctttcattaacgcagtacctcctgttcccccgatcctcccggccgcccatcaaatatccgaaacatcagatcataaggaatactcaatatgttttcattataacatcattcgacaatacaaaaacaggaaattcttcaagagaaccatagctctctgtacatactaaatctccagacagagaatatcagcgagcctgtcatcatacagggcgagcagcccatagccgactcccgtatatccgctcatcaggcccggattgtatctttcctggggcagaaggcagaaatcattgtctttcagtttctcatatacatactttaaatttctttgcctgatgtgttccgcctccttgtctcctgtaaatttacaatactcctgcagcatgagcagattcccgagactcccgtggcagagacacattccctcccttacgcatttcccggcaagctttgcagacgcccgtttcacatcaaactcgatcaggtccccaagctcttcctgctccatgtttgccgacataagtctggacatgagaattccacccgcgccatgacaccaggccaccgtatccgccaacttcctgtctgcacttttgactgccctgaagtccgtccagtttttcagtccgggatcataatatttatcctcgtaacaaagcgcctgcctgaacacatctatatactctgcctttttacacacacggcagagcgccgcaaatgcagtcataataccggcatttccatgcgacattccaagcagcgcctcctctgactgagcatttttccagcacaggccgtcttcggtctttaccgccgctttaatcaggcgccctgccgcctccttcgcgcgtttaagccagccctcatcctctgtacactcatagagcaggcagcatgcgtgaaccgcccctgccagcccgtccagcaagtcatagtttacatccctgcaggcacatcttacgacgatctccccgtgccgccgggcatatgtcagatactcctcattccccgtcctcttataaagaaacagatagccatacacgatggacgcctctccattgtagatccccgacgccatatcatccgtcttagtctcccgcatgtagtccgtataggcaaataactggcggtccagttgtgacgccgcgcagccgaactccctgctgccggaatactcatgcagcagatgcagaaaaacagcaattcccataactccgctgtagagatacatatctaccggctgaatcatccagccaagacttccgtccgtagtcacacaagccatgtaccatcctttttcgctgccgtcaacatttaccgcccccgcaagaagcctctcccctatttcaaccgccatctcaagcagcttatttttctcatccggtttaaattcacccgcagcactgcctccgtcttctgtcccctcgttcataagttccttttccgcctggctttgcagcacaatcgtcatttcaatcagctcaagctcgtttgacatatctgcttcattcagatcctggatccgctcaagcagcatatcataggatgttctggcaaaatacccctccagccgttttccgtccgcatgatacaaatgcttttctgaggaaatgaaataaaagaacggtatatcgtgattcagcaggtcctttacctcccactcaacgacctgcctgtcacctttactttccatacttcttccataccacatcgtgtacagatatatctggcgtctcgccccgtctgtcataagcgccgggtgatacgaactgttctggcacatgacataacgctgtgtatccgcaagcagataccggctctctacgcatttcagcggttccgtccactgctgcagctccctgcggttacaaagcgcccacatatacgctgctttaaagccctctgtcatatcgtccagataccgctccggatccgccggccttccctgaagcacaggtatattgtcgtccgggtcaagaaccggatgtacatactgtatctgtatatcggatgatctgctgtttacgacccggggcaccttaaacggcatccggctgcctccccgccctccgactccgctcacattgacattaccgccgccgcttatccacttacagctcgggagcgcgccggaatacagcacagacttatgcagaaaatactgtaccttctctgtaatgttcattgcctcgaactcatccggcgcgctcataatattctccaagtctacaagcaccggatactcgccatgggcaataatattttcactgtggatatcattcgtaccgagcagataaaatacgaaaatgcacagccccattctgcggtaataccgttccatttcttcccggcaggcacactcctgatgtttcacacattcacaaaacccccagtcactgccctctaccttcttcatccggtacatctccatcccgcatctgttccccagctgccggagaagctcgtggaataccgtttcattttccaggctgtgcggtttgtatataactgtcatgccgttgtcgagacttattttgagcacactctttccgcccctgtgggagtccgcgatgtccccttctatgccggtaatatatgtaaatgtcctctcctcacaaatttgttctgtgatttctttggacgcatcactgagcctgtttaccgcctcagcatacagttgagccgacagctccaccgcttccgctacacttcttgccagaaccgggtatttgccgaaaaggctgtttctccactccccggtcaccacttgttttataaaatactcatattcaccagaagcgtccttcccttccagctccccatttactttgcactgccgtatctcatgtatcaaagttcggatacatattttttgaatctttgtaaacagagagcgcaaatactgctcatatacttccggcctgcatatgtcatccttcacaataagatgtttcatcctcaatattcccgctgccagataaggcgtataaaactgaataaaattctcagactcatatttagctataaaatccgctgcttcctggggaattccacgttcattacattcatatttattaaaaagccgcgcagcttccccgcgatccgtctcatatgactgattcgataaatagctctggattttcggaatattggtgtatagttctttaaaaaaatcttcccccatcgttctgttccagaattttagctcttccgtgtctgtctttgggggagtatattctgtgttatcgtaagttcgctcccatagataagattctcttgtgtcactcatatgcacctcataagtaatcattttatataatttatagtttaagaaaaggtaagagcatcaagcccttaccttttttcaacttaacagcagataattgtacagaatgatgtacacgcttttgaccatgtagaatatggcacgccgacctcttcgtcaactaatttctgcatttcttcaaactccaggtttaaatcccctgtaatcgctacatttttctcttctctttgcattttaatctcctcctttaatcaatatttataatccattctcaaagaatgtaattaccactgaaaatatatcctcggtatggctgcactgcacctcaccatcatatttctcaactaacgttttcactgattgtaagccaagcccatgtattgtcttattttctttttcagtaatgtattttccatccttgactaaaacttgtctttcaatactattttctattttaataatggacatttgttttttatttctaactgcaacatggatccatttttccttttcttcaattttctcgcatgcctcgatcgcgttatctagaagattaaagaaaataatacctaaatcattttcatcaatatactgatatgaaatattctcaatttcagtccaaaatctgatccctttttgatttgactcgtatcccttcaaattaagcactaaatttaggacttgtgaattacaataggtataattactcagttcttccaaaggctctactatgtcttccagatattgcttcgcctttaaatactcctcacgttccaaataattcctcaatagtatcatatggtttttgaaatcatgataaatatatttgctattctcatataaatcagaaaaattgtcgtaattcttttcaagcagctcatttttcatttgtatcatctgtgactgcatctttagataaatacttttaagttcaatagccatgagtgcaatcagtatcgcaagacacgtaattacaaataaactatcccccaaattatttttactgcttctgtcaagcaaagttctcagaagccaccatccccatatacagcctatagttccaaatccaaacaatactcccttataatcctcaacctgaaaccggaatttttgggcacagcgctgaagaacaaaacatataacacacagaacgactcttgataaaatgtaaatacaaattcgtccaaaacttatattataataaattttactccaaaaactttcacctaaaatacttatcgaaaaaaatgagaatcccaaatccaaaagagtggtaagcagcaaggtgtcaaaaacaaaaataaaacttaataaagcctttctacgataataaatgaatactcccaaccataatgaggcgatttctgctcctaatactaagaaagataaaaatgcaattcttctgttataaactataaaggccgctatcaaacaagtgcacaccgcaaaatacccacgatgtctccccacaacttcgccatgatagatcaacttatcacaggcccaaaaacagactccgatctccgccagcgccagaaagaattgcagtatttccacgatcatatatgctctccccagtattggttgatcctctgcttcactgacttaacgttagccctgcttatctccaggacatcgccgttatccatatggacttcatttctcaaaatcttgtcaacgcgctctatatttacaatacttccccgttcaatctgtatgaaagaagaaccttccagctccttgaggactttttcgagcgttgacctcttcttatgaatctcattgtcggtcactatgactgtattcttgccttctttgtacatacggattatcttctgatgatctatcttttcgtaacgtatattattatgtattacgagaaactgctctgtcttgtttttcaggttattctgaatcttctcaagaacatacggcagtgttgtcttcattttgccctttaaaatatactggtaagcctgaatgctcaggtcatagctgtatatggcaaattcgggatgagacgtaaggaatacgatatacgcattttcctgtacttttcttatatattttgccagctctatcccgttcacacccggcatctcaacgtccagaagatacaagtcatactgcctcttttcttccagttcatatttgagcgttaccggttttgtaaagcatttgatgttgtcaagctgctcctgatttttccccattttgtccacgacaattttgtagactaaatccacgatttcctgattgtcatcaacgatcgccactctaatcataatgtatctctctaacctttatctttttatcgtaaaataccggttgcggcgcatgtcccaaaactgtgcccgctccccctgtatcgtcagacggtatttatcctttggcacaacatttttgctgctgtccagctttttcccgctgtagtagtaatatacaccgtcttttccattatttaccttctctattatatcatcaattacttcctgaatcgacatcgaatgtatatgaggattccatcttccgatcatgctccttacctgactcttgttcgcccttatcaccgggcagtctttgtacagttcaaggaacagttcttccttctttatgtcgagaagctttataatactgtcaaataaactgccgttgtcttcgtagctgtttcccagctcaagatacacctgaatatgcgccagtgacaatcgcacaaacctctcgtcaccggttatcagatacttttcataaagccatcttatactacccataagcactttaccggtctcaagtccttctctctccaaattcattacggccagccggatagtctctgcgttctccctcgtatgttttatcattcattccgtctccgtcttacacgccaactacttgcatattagtaaagatgtatgcatattagttatttcatattttctgaaaatattgttaaactaatcccaaaagtgaaaggagccattatggaagaaaaaatcggattcagagttaagcaggcacggctaaatgccggtcttacgcaggaagaactggccgaaaaggcgaacatgtcttccagctttatcagccgtctcgaaaatgggaaaattcttccaagcatcaagaaacttcttatgctggccgatataatgaacgtaggtctggaagatttactccgtgatttttttcgtcatacgggcgagccttcagatgcacttaccgaacaaatcttttatcaagtggatatgatgactgttcctgaaaaacaatatttattatcatttgttgagtcatttaataactttatggataaaagataacacgtttataaactattttgtatccttgtctttaaacagtgaatttatgtccccaaacaggtgtgtccggggttaataaaaaacaggcatttctgcctgtttttcttgtttattcttttttatgtccttatttttcttctttgatcgtctccagaacaagcgcggaatgggctcccatattgacgaccagttccccgtccacaacaagatattcttcatactccgccgtatgtcctttagagtatgagtatatgagccgtttcatcctgcatttctccggcacttcagctctccataccggcactgtcacttccgtgagctcgcttctgttattgatgatcacgatgatctgctcctcctcaagaaagcgcccgtatgtcaggacattttcttcccatgacagcatattcagggagcccgtccgcagtgctttatgctctttgtgtatgcgtatcatctctttatgaaaggagagcatctccatatcttcatttccccacggatacgtacgtctgttgtcaggatctgtaaatccgcagacaccggcctcatctccgtaatatacggtcggcgcccctacccatgtcatctgtataacgactgcctcccgcatgacggcgggattcacatatgcctctgccgccttgggacccagtttctcaacgcggcccaccatgtggtttgtcctcgtcaaaaatcttgagtggtcgtgatttgacagctcattcatggccacctgaagagacggggtgagcatattggacatatggtgtgagatagagcccacaaaattgtctgcattgcccgccagctcctcgcgcgcttcatcactgtgcttttcaagaccagtcagaaaccaggtgaccggctccataaatgcgtcatagttcatgaccgtatcccactcgtcgcctctgagccagtcgcttggatcgccgtaatgttccgcgagtatgatcgcgtcaggattggcatcctttaccgcctctctgaatttcttccagaactgatggttatactcattgctccggccaaggtccgccgccacgtcaaggcgccagccgtccacactgtatggcggtgatacccacttgcgcccgatatataaaatgtaattttccagttttacagaatcttcataatttaatttcggcagagtatcgtgtccccaccatccgtcatagttggaattatacggccagttttccggctcttctttataaaatctaaaataactcctgtacggactgtccggggatacatatgcccctttggcatagtcgctctggctttcatatattctctctctgtccatccatttattgaatgaaccgcaatgattgaacaccccgtccagtatgatcttcattccccgcctgtgaagttcctgtaccagttctataaataactgattgctggcttccagatttctgcggtctgtcgtccgtttctgatacttgcctgcctgggagttatcggtcacgccctcaggcaggacctctcctccgtcttccacgatcactccataatgagggtctatataatcgtaatcctgaatgtcatatttatgatttgacggagatacgaacagcggattaaaatacagcacctctactccaagctcctgcagatagtcgagcttttgcataacaccttttaagtctccgccgtaaaattcacgcacgcccatcgtgtcgggatacttgttccagtccgtgactttcctgctgtagcctccgatataaaagtattcatttgactctacgtcattggacttatccccattgcagaagcggtcggtgtatatttgatacatcacggctccctttgcccaatccggtgtggaaaatcccggtgcaattacaaaatcataaaattctacaacctcttttgacacaccacatctgttgtaaaaacagacgtcttcaccagagcggatttcaaagcaatagtggaaacgctcctcattcagccgccagttgatcgtgtaatagtcaaatccgcctcttgtatctgacttttccatttcgtaacccccaactctggttacaaggcggacgcattccacatcatctttggctgtacggaacctcagcgtcaccatctcgttttccgccggctccggcggactgacatagcttgcggtcccatcacaaaacaaagcttgttccttcatgcaactcaattcctctctatatttttatatataatatatttttaagcctcagacacctctcctgtaaataaagactcaaattcatcccttgatattttttctttttccagcagcagctgggcgcatgcgtgcagtacatcatcatactttttgattatgcctcttgccctggcatagcagtcgtctattatacgttttacttcctggtcgataactgtggcaacgctttccccatatcctctggacgcgtgcgccaggtcgcggcctataaagacctcatcactgtcgtcgtcataattgataaggcctaccgcctccgacataccgaattttgtcaccatggatttcgcaagacttgtcgcctgtttgatatcctgtgacgcgccggtcgtgatatcatccagcacttcttcctcagccacgcggccgccgagtgcaaccgttatatcctgcagcatctttcctctcgtgttaaacatctcatcgttttcaggaagaggcattgtatatccgcctgcgcccccggtcggtataatggaaacactgtacaccggccctacatccggcagtacgtggaacagtatcgcatgcccggcctcatggaatgcagtgatccgtttttctttctcggaaatgacgcggcttttcttttccgccccgattccgactttgacaaacgcttttcttatatcttcctgtttcagatagatccggctgtcctttgccgcaatgatggccgcctcgtttaagagattttcaagatccgcgccggtaaatccggctgtagtctgcgcgatctgctttaagtccacttcctcgctgagcggctttccttttgcgtgcaccttcagtatttcttccctgcccttgacgtcaggccgtcctaccatgaccttcctgtcaaaccgtccgggacgaagtatcgcagggtcgagaatatcgacacggttcgttgcggccatcacgataattccctcgttcaccccgaatccgtccatctctacgagcagctggttcaacgtctgttctctttcatcgtggccgccgcccataccggttccgcgccgtctcgccaccgcgtcgatctcatcgataaatataatgcagggggcgttcttctttgcctcctcaaaaaggtcacgtacacgggaagcgccgacgccgacgaacatttccacaaaatcagaacctgagatcgtaaagaatggcacaccggcttctcctgccacagctttggcaagaagtgtctttcctgtccccggagggcccacgagcagtacgcctttcgggatacgcgctcccacctgaatatatttcttcggtgacttaaggaaatctacgatttcctccagttcctctttttcttccgtcagaccggcaacctgggcaaatgttatctttttgtccatttccgtactcagccgcgcccggctcttcccaaagctcatggctttggcgttggcgccgccgccctggcggttcatgaagaagaatatgatcagtataccgccgaacatgagcagcatggggacgatcgtagttgtcagccagctgtcctgcggcacatccggcatctcatactctatgtttttgtctttcagatagtcctgaatgtcattgacatcagatacataatagtattttacctcgctgtctgaggtctttttgtcctttaactctatttccacccggcctgtaggaacatttttattctgagagaccaccacagactctacattgtctttctcgatcaccttctggaactgcttccaggtcaattctttttctttctggtcaaactggttggtgaaccacagcgccgcgaataaaaacacgacgaagataagcagggtcacaccgctcagccctcttccttttttctcgttcaatgtttatagcccctttctactccacaccttctactacaccgatgtatggtagatttctatatttttgagcgtaatccagcccatatcccactacgaattcgtccggaatctcaaacccgacatagtcaaccgtgacatctcttacgcgtctctccggcttatccagcagtgtgcacagcttcatgctgtttggatgtctcttggcaagtatgtcgagcagataatacagcgttcttcctgaatcaatgatgtcctcaacgacgagtacatctttgccttccagcgcctcatccagatccttggcgatctttacgacaccgcttgaggacgtgccgtccccgtagctgcttacgctcataaagtccatggataccggaactgtgattctctttgccagttcacacataaagaacactccgccttttaacacacagataaggtgtacctggcgtcctgcataatcttcactgatcttcctgcctaattcatcgatcctctttgcaacttcttcctccgacaacaatactttaacagtctctgccatctctttttcctccgtctacttctatttccagaattcttttcgtctcttccgttacctgatatttctggttctgccttacgcccaccacccacataatatgatgtccgtcggccgcgagccatatctggtctctttcttcctgtggtattttttcattgataaaaaactgtttcagcttctgggtcctgccgtccctgtcaatggtaaggtaatctcccggctccctgtgcctcattttaacagtattctttattatatcataatcaaaccatttcgtgtagggggatttgggaaatgttctcatctcgcctgtcctctcgatcacgcggcatgtcatatgcatatcttccgtttttccgccgccggcagtctgccggccttcctttgtaaagcggatgccttcgtaacaccgcacagccgtcacaccgtaaggcagacagagccgtctgcccacctgcctgtgcatgagttctgttataagccttacatggaccgcttctatatttttgctcctgcccgcagtccggcagagaatgcggtgtatcacatacggtctcagcacttccggcacacgcgcaaactccttcttcagtagcaggcttctccccgccccgtctgtgtccacgcaggctttttcctgctccgcggcctgtgaatccacgtatgctccgagaagccgcatctgccttgccgtctccgccatatgttcagatgcctgcgcgttgatctctttttccagatagggaatcacctggttgcggatcttattccgggcatagctgtcctctgaatttgtttcatccgtacaatatgatattccccgttcttcaagatatgattccacttctttccttttcaggcacaaaagtggatggatccacaccccttcaaccggcgggatcccccccatgcctttaagtccggttccacggcagagatttagaagcagcgtctccgcattgtcgttctgatgatgggccagcgctatcttcgttccttgtttcttcctcagcacttccttaaacgcggcgcggcgcacctctctgcccgcctcttccaccgtcagcttatgttcagccgcgtatgtcttcacgtcttcatgataaactaaaagctctactttctgttcgcggcagatcttttcaacgtactgcgcatccctgtccgcagtctctgcccgcagcccgtggtggacatgaactgccgtcacggagaagcctatctcctttttcaattccagaagcacgaaaagaaggcatatggaatctgcccctcccgatacgcctgctatgactctgtctgactgctgcagcatatgatattctgccgcatattctttgacacgctgatacatgtttatccaccagttcttatattttcttatcttaaatatatagaagttccctctaaattgcaagttttcctcacagtttccacatcccgaccgccagcacggtcatatcgtctatcgggacttcccccgtccattccagcacttgtccgagtatatgatgcgcaagttccttcggattgacaatattggagccttctatgaaggtactcataagtacatcctgttcaccaacaggaagggcatccatgactccgtccgtcaccatgatgataaaatctcccgactccagctctttttccacagattctatctctatatcctgtatgacgccgatgggcagtgtcgtggaactgattctctccaccccgcttttccttttgataaatgttgtggacgcgcccgccttaacgaattcacattttccgctgtacagatcaaacaggcttacgtcgatcgtagaaaagcgcacttcttctctgccgatgacaagagcggtgttcatcatctgaattgccgtcttgaccgggaaaccggcctccagcagttcctcaagcatctctacgaccatagtgctctcccgaagggcgtcttccccggatcccatgccgtcggacagcgccactcctttttttcccccgggcaggtctgtcataaggaaggtgtcccctgatattttttcgcagccttttccaatcttggccacaccctgcagcgtatgatacctggcgccttccacacaggcgaccgtacagtagtcctccccgatgatcggacgctccccctgctccagcatcatgacgcggcctacgcatctgccgatctccgccgccagctcctttgtggctatgcagtgcccttttgaggcttttaccgtcacatgtatctcatattttccctcggcagtcacgaaaaatacagaggaaagcatgcggatgccaaactttttcaagtgatttttcagctttttctccagatgctcgtcctcaaaaatgccggcgtccagttctcttgtcgtgtactggatcatccttgcaaaactgttgagctgaatggcgtacccttcccggttctgcacgatccggttgttccagagcaggatctgcttggcattttcaaacacttccagtgtctccctcagaaaccggggcgctgatatgcattttttctgaagctttctctttatctctacattcagctcggcgccgtattcttctaccgtgcatagtatttcgtaaagcatctgatatgtatgtacccggttttcgccgagacaccattcttttttctcgcagttttcgcacaccttgtccgttatttttacaaacatatcctcgatctcttctttggagaacgttcctttgtagtcttccagtgtaaggaatgtcctggacaagtgcataagtgaatctgcgaacttgtccatctgtatgacataagggttcagaaacgtacccttttcttttacttcagccatgatagctcccccttttttttattgaacacaaaaaagctttaggaatattgtttcctaaagcttcatcatctgtgtattatatcatctaatctattttgccttgaatatgatctcaccttcgtggacgaggccgagcttttctcttgccacatcttctacatattcatcagtgcctacgtaatcttccagttcgtcgatcttggacgcccggtttttttcttcttttatctgctttttgagctctgtctcctgtgcgacataagatttttccttcgcgcgaagcgttatcccgttgatggataccatcacgagcagcagcagtatgactgaactgatagccagcacacttcttttgtggcgctgaacacgctttttctgccgtctcctgcggctcttttgtttaattccattcattgttatactcacccttttttccggcccgcagaccagaatactcacccgttaatcataataatattatctttttttgcctgatttatcaatagttttggacaaattctttttgccgcgggcgtacatttttttgtgtactttttcggcctgcctgatcaaaaaagcggccaaaagggctccaatcacaacacctagtataaagtaccaccgaatgctaccatcacttgtatggtaaatttgcacaaacaaatacagcgccgagccgagccagaaaaagaaatcctccacccctatcacggcaaggctgtgctttacgatttccctgaaactgctgatacatttatatataagacgcacgatcgcccctgacaatacggccagtacaaatacaataaattcttctctgattcccggcatatgcagttacctgaacagtttggaaaacagattctccccttgttttcctgctgcatgaacgtcagagtaagcgatgctgtcaatattgccggacaagtctacctcgcctttttccaggcttaagcggtttacgtgcagatccgtccctttgaccatcatcatcccctgctctgtctctaaaagaatctcatttaaatcaaaagataatacatctataacgcctgtcaccaggctggtttttctattattaactaccagcttatgtcctttttgtactggtctctcttccatgtgcatcacaacctttcttcataatcatatgacaggttgttcttctttattacaaatatttgaacaggtcctttgcctcttcttttttcgtcgtctcctgtatatcgagcacttctactttcactgtccttgtcccgaactggatctctataatatcccctggtctcacttttaccgaagctttggcaacgcttccgtttaccgtcacacggccggcgtcgcacgcctcgtttgcaaccgttctgcgcttaatgagccgggaaacttttaaaaatttatccaaacgcatgatctgtctatgtcctcctgtctattgtaaactaaaaaagtagagagcagtgtgctctctacttgttaaaccgccttaatccttatgcattaacagcgtcttttaatgctttaccagctttgaatttaggagctttgcatgcagcaatcttcattgtcttgcctgtctgtgggtttctgccctctcttgctgctctttcgcttacttcaaatgtaccaaatcctactaactgaattttctcaccttttttaagttcagctgtaattacatcaacaaaagcttttaaagctttttctgaatctttctttgataattctgcctgctcagcgatagctgctactaattctgttttgttcatggataatttcctcctcttgtttagatatagaatcccttactaaaattctactgtttttaaaaaacggcccgcgccttcatccatatggcgttgcccttagttactgttataccttctttccctatgtttgtcaagggaatttcgcagtttttgccgtatttccaagggttttaccggttataacatggtattgatcatggacaaaacttcctcgccgagcatgcgtgatttttcatctgcatcttccagagacgtgccttttatgccgtagtaaaatttgaccttaggctctgttcctgacggtctcacgcagagccatgcatcgtctgtaagatcatagtaaagtacattggatgccggcagtccggtaggcgtcacttctccggtcgttatatccttgatgatatcagcctcgtaatctctcgccttcagaactctgtagcccccgacttccatcggcggattcttacgcagcgtctccaggatctcctgaattttctgaagcccttctattccttttaatgttatggactgaatggaatccttatagtatccgtatctctcatacatgtccaccatggcatcccagagcgtcatgcctttcgtcttgtagtaggctgccgcctcacagagagccattgtcgcaacgatggcatccttgtcccttgcatgtgttccgatcaggcagccatagctttcttcaaatccgaacagatactttccttttcctgtcgtctcaaatcccaggatctgctgcccgatatatttgaagccggtcagcacttctataagccctacgccgtagccttttgcgatggcgtcggccatgttggacgttactatcgttttgataaggtatccgtcctccggaagcccctctgccgccttgcgctggccgagctcataatctgccagaagacagcctgacatatttccggtgagcactttatattcgcctgattttgcatcttttacgtatacgccgagacggtccgcatccgggtctgtcgcgagcacgagatcggcatctacttccctggccaatttcagtccgagcgtaaatgcttcttccgcttcagggtttggatatgagacagtaggaaattctccgtcgggaagctcctgttcttttacgatataaacatttttaaatccgagttcctttaatattcttctggcaggtatgtttcccgtcccgtggagagggctgtacacaattttcagttcgcttcccatctcgtcaatggcgtcctgatgaatgacctgttttttaagctctgcgatgtaaccgtcatctacttgcgcgccgataacttcgtacattccggcagcttttgcatctgcaaggctcatcgtctttactgtattgtagtcggtgacagcctttacctcgtccataattcctttgtcgtgaggcggtgtgatctgcgcgccgtcttcccagtataccttatatccgttgtattccggcggattatggctggccgtgatattgatacccgcaatgcagccaagcgcacgcacggcatatgacagctccggtgtcggccgaagtgtctcgaacacatatgccttgatcccgttagcggcaaggcagagagctgcctcatcggcaaattccggtgacatacgtctggaatcgtacgcgatggcaacgcctctgtcctgtccgttacgtttcatgatataatttgcaagtccctgtgtagctttcctgaccgtatagatattcaggcggttcgtgcctgctccgataattcctctcagacctgcggttccgaactccaggtctttatagaaacgctctttgatctcgccgtcgtctcccgcgatttccctaagttctgccttagtgtcttcatcaaaatatggattctccagccattctctgtacttttcaagatattccataaataagtacctcctgtctcttatatgcttcatattatacaacaggattctataaatggaaagaaaatatattctccaaaaaccgcttcttttcctcggtctgcctgatcgccacattcagtttctcaatacttttcactgatatccacgctttgttggagtgataataagaatctgcgatcttccagaatttttccggatatatgagccggtttttgatatactcggtctccccggaggacagcggatgtatggcggaatacgcattcagcatattatcgccgagccgttctttccagccgtgcttttccataacctttctgagaaaataatacaaatcttctacctggatatcttttttaaatttgtcaaaatttgtcgtcgcgatccggagcggttctctcgcagaatggcttccgtgcggtctgtagtccgctcctctgggcgcgttccttccggaaactgaagccgggacagcttcccccgcagccgcggttcctgagaggatgagaatattatgataattatattcaccatgggtcatgcatccccgttccatgctgtctgcgtacaatgcgtcataatccgaacgctccagctcctccagcgccaggtccgcccactggtacatctggtcaaagtatttcaaaaatgcaaattcaaattcccctttgggcgagagcccccgcataaatctccgcactttcttaagctcacggttatgccggatatattcctccccgagatgcgcaccggccggggcgccctgctccagttcatggcacattacggtgtgaagtttagcaagattccctgccgccgccagcagttctgccggtttacggatgtcacactcacgtccctgataccactgcttcaatatatatttgccgccgtcctccgctgtactgacgtattctccctccttgttcaggagaatcggatccgtccattcgtagccctggctcttcagatactcatacagctcgcaaagcgcaggaatacgtttctcagaagtcgtcacctcccgaagcagcagaaacccctgttgtgtgtcgcataaaatagcaccccttgtcttacgggtgccggtgacatctatattatattggtctaatacatttagctcatattcttgcataacattcccctgcactttatataacatattctttctaacgtatgatataaaacaacggaatatgcaagggggacagggtaaaatgagttggggacggaggttttttaaaaaacctccgtccccaactcatttttaccctgtcccccgtatgtttcattttatccccagacggtccagcagcttttctttcgtgttcatctccggttcttctattacaagagccagcaattcgctaagtttctcacctatctctttccccggagccatgcccgcttctatgaggtctttccctgtcactgccagctctttcagcgacacgcattgtccggccgcttttatttctttgtatatgctttctatctcattcaggttttgtatcttctcttctctgagatattcactctgagccagaacatctgcttttctcacttccatataatatgggaacaattcttctccgatcatgttcatggcacggcgtatgttctttgctcttgcaggcatacggtaatcatgataatagacaagcttcgataccttgtgcagtgtatcattatcaaatttcagccttcttagcacacttctggcaatattttcactttccagggcatgctttttaaaatgtgccacgccgtttgcatctactgtcttatatgctggttttcctgtgtcgtgcagaagcatggtaagcctcaagatcttatccggccttacattgttcattgcgtggagcgtatgttctcccacattgtacatatgatgcggtgtctcctgctccgtctccatcatccggtcaaactccggcaaaaatactctcgtgatgccaagttcataagctgtcataagaagctggggccgctttgatgttaccatcttaacaagctctgtctgtatacgctctgcactgatatttttcaatgtataagcaagcttgcgcattccctcttttgtctcatcttctatatcaaacccaagctgggccgcaaaacgcacccctcttaagatacgcagtgcatcttcggaaaacctttctttcgcatcaccgacacatctgatcaaaccgctctctaaatccttcatcccgccaaatatatctatcagaccgtctttttcattatatgccatggcattgatcgtaaaatcccggcgcagcaagtcctctttcaggcttcttgtaaacgtaacttcttttggatgccggttatcttcatattttccgtcgattctgtaagtcgtgacctcgaatccctcatgctcgagcaataccgtcactgtaccgtgttcgataccagtatcaaaagttcggggaaacagtgactttgtctgctccggcatcgcagaagtggtgatgtcccaatcctccggggtcctcccgagaacagagtccctgacacaaccgcccacagcatacgcctcaaacccatgtgcctggagcgtcgtaatgatttcatttactttcgcaggcagtttaattattaaatctggcaaaacaatgacctcccctgaaaatttacatagtaatatcataccctttatttaacatcttctgcaatataaatattgttggggacggaggttttttaaaaaacctccgtccccaacgcattttaccctgtcccaaatttaaataaccatgtccctcttttggttaaccggttccttttatttcttttctaagaactgcctgaatctcatccgcacctttttttgaaattcccagagacttcattaaaacttcactaaacagcctgcgcgtgtctatgtattccaatatttcctcttcaggtacccccagctgccactgcatatcgaaaagcacttctcgtgctattctcagattattccagtgtgtgtcttccgaaacatccacaaatacatccctgttatcccttttatgaaatgccagaaattgcttgtttgtctgaaatcttttttcttttactataaatgcatgttcgctcaaaatgtcacctttacggtggcaatactcatggaagctgcagaatttatagctttgcagtttattcaaatctctatccatcaggggattaaggtggatatacctaagacagttccagaaatactcctcttcttcgatgcattggctcttgaagcggtcctgaaacacatatcctattcggttattcttgtagttataatattgggcatatgcggctaagactttagccataaatgatgaaagctcctgaatttctgttttgacaagcagatgtatgtgattcggcattatgcagtatgcatatactgccacattaaactgggataggttatcccgtagtagacttataaatcttttccgttctctgttttccgcaaatattgcagcgcggtttaatccgcgggccataacatggtacagccctgttatactttctcttcttctatgccttgacatatattttatcctcccagcagatggggacagggtaaatttgtttggggacatgactatcttagttggggacggaggttttctaaaaaacctccgtccccaaattaaaattaatatgattttccccaatatgccatgtgttttgcaggttttccacaccagatgcacttatctgatatcatctcttcatcttctataaggcaccgtgtagcagctccgcctgtagcgtattttacttcaccttcgcattccggatctccgcaccagcaggctttgacaaatccgcggtttgctttgaacttttcaaccatttcgtccatttcaacagctgtgtctatatgaccgttcaggaagtctaccgctctgttgtacatatcctcctggatcgtctccaaaatgtcacgcagctttgtagcaatttcatccagagaaacgatgatcttttcccgggtatcccggcggacaacaacaacctgattcttttctatatcttttggaccgatttcaattcgtgtaggaataccaagcatctcctgttcagagaatttccatcccggactcttttctgaatcatcgatcttcactctgtaaccggcctttttcagatcatcgagcagtgcgtttgccctgtcaagaacgccttctttgtgctgtgcgatcgggatgatcctgcattctacaggcgcaacatgaggaggaagtacaagcccgctgtcatcaccgtggaccatgatgatcgcgccgatacttctcgtggaccatccccatgatgtctcataggcgctgtgaagctggttgttcttatctacatatttaatatcaaatgcgtcagggaatccgcttccaaagaagtggcttgtcgctgactgaagcgcttttccgtcatgcataagcgcttcgatcgtatacgtgtcctgcgctccggcaaatttttcatgttctgcttttcttcctgatacgaaaggaatggcgagcgtctctttgtagcagtcctcatatacatggaacatctgtatcgtacgttcctccgcctcttcataagtcgcatgaagtgtatggccttcctgccacaggaactctctggaacgaaggaacggtcttgtcgtcttctcccatcgaagtacagagttccactggttccacacttttggaaggtctctgtatgactgaacggtctttgaccataaatcacagaataaagtttcagatgtaggacggatacagagcctttcctgaagtctctccataccgccgtgggtaacccatgcaacctcaggagcaaatccttctacatggtcggcctctttttcaagaagattctcaggaatcagagtaggaaggtatacattttctactccggtctctttaaaacgtttgtccaagtctgcctggatcagttcccaaatagcatagccgttcggcagatagttgagacagccttttacgctggaataatcgcaaagctccgcctcacgtacaacatctgtgtaccattgtgcaaaatcctcatcacgtggtgtgatattttctactaattttttttcctttgccatgtttctcttctccttttaaccgcagggcccttgccccacttatttaattttcgccgggaaacaaaaaaacgccgggcctttcgtttccctgaaaagggaccgaaaagctcggcggtaccaccctagttaactgcgaccctttcgcagctctctctgatcaccattaacgctgatgaaacgctgtgctttcgcacagtggctccaaggtaggttcatcgcatttcaaaacaagaatctttcagcgccgcggattctctctctgtggaatttcctttgcaactactattccttttcatcgcccattctgccttgtgcaactagcattgccggcagatatttagttaaacgtaattttactttagcaggctatatttgtcaagcaaaatttaccggctgatacattttatctcaataaaatgtacacaaaaaatgcgagatatgccaacaaaaacatgacaccttctgtctttttaatttcatgtttgctgatggccgccacatacacgatgatactggcagcgacgagtatgagagtatcatacactgctgtcacgtcaagttttataggggttatgacggaagacacgcccagtatcagcagaatattgaaaatattggaaccgacgacatttcccactgcaaggtcattttcccccttgccggcagctaccatggaggtcaccagctccggcagtgatgtgcccagagccacgatggtcaagccgataaatgtctggcttagtccaaagtcttttgctatactgctggcactgtcaacaacaaggtctccgccccatatgatacctgccaggccgacggcaataaaaaccccgctctttaatgggctcattaccttatagtcttcctcatcgaccggcatttcattcctcgatctcagcgcagatcgtactgttgcaaaaagaaaaaccacaaacaacgtcaataataacagaccgctgtatcttccgagaacaaaaatctggtcacctttcaatacctttgtaattgaaaaatcagagttcagcagcagcagaataagtgtaataaatatggaaaaaggaaactcttttctcagaagtgaccatttggccctcacaggctgcacgagcgcgcagcatcccagtaccacaagaagattaaacaggtttgatccgagcacattgctcaccgcaagatcattgttccccttcagggctgccgttgcactgacggaaagttccggcatgcttgtcccaaacgccacaacggtcaggccgatgatgatggccggcacctttaatatctttgccacactggagcttccgtccacaaacagatctgctccctttatcaataataaaaagcccaatatcagctttacatactccatagtcaactatcctcttccgctcaatatatttgcatattttcatgcactatgtttaaatgataagagtccattcaaccaaagtcaaggagatttctctatgaaaagtaaccgtttagatatattgtatgaagataaagatataatcgtatgtgtaaaacctcatggaaccgctgtccagactaaaaatacatcggctccggatatggtaagtatgctcaaaacacatattttttctcaggaaccgcaaaacggagagccttatcttgccgtaatccaccgcctggaccagcctgtggagggaatcctcgtattcgccaagtccccctttgctgcgaaagagctgaaccggcagctgcaaaataaaggcttcggaaaatattaccgggcgctggtggacggcattccaccgcgagaagaagatacactggaaaactacatgctgaaagacgggcggacaaatacttcccgcgtctgcacaccagatacccccggcgccaaacaggcccggctgcattataaaatactccaagagggacagggttatttcaaaaagggacacggcgaaacgaaacggggacgggggaaatctcaatttcccccgtccccggccggcccgcagaccgagctggatattcagctggacaccggacgcctccaccaaatacgcgttcagatggcccatttaggctgtccaattgccggcgatacaaaatataaccctggcgctccaaatgacggagaatggcagcaaatacagctgtgcgcatataaattaagcttccgccaccccagaacaggacggcagatggatttttttttattgtagggacatagatacctcaaaaagggacacggaaaacgtcagcggggacgggggaaatctcaatttcccccgtccccggccggcccatctccgccaaaaaggacatccccgcaaggatgtccttttccgatctctctcaaatctcaatgaccgccaagttctatacttctgccatatctggctctgcaactggctcttcttgtaacgcttcttcgtatctctcgaggataatactttgaatccgctctcttgttcccgagttgattggatgcgcaatatcccgatattcgccgtctaatgcttttttgctgggcatagcaataaagagtcccttttctccttcgattactttaatgtcgtgtactacgaattcatcatccatagtaatggaaactaccgccttaagttttccctcttttgctactttacgtacgcgtacatctgtgatttgcattttttcaagcccctttctgtcagccgtgcactatagtgcatacctctcgttcttttccacgactaccttcacaccgttctcaccaacgtggcgcgtatttgctctgattgtgtcacgactttctacaatacagttctcaatgtacgtattgtccccgagatatacgtcgttcagaattatggaattcttaatcacgcaattgttccccacaaatgtcttcttgaacaagatggaattttccaccgttccgttgatgatacttccgcttgcaacaaggctgttctttacgaccgaacccggattatacttcgcgggcggcagatcgcttaccttggagaaaatatccggatgttccttgaagaagtagtttctcacttccggcttcaggaaatccatatttgtgcggtaataagcatccactgtggaaatgttgctccagtaatcttttatcttataaccgtatatctttttcagattcttatatctgataagaatgtcggttacaaaatcgtgcctttcctcctctgcgcagtgctcaatcagatcgatcagctgtcgtcttctgatcacatagatcccggttgatatcgtatttgaagtcgccaccataggcttttcttcaaattcctcaatacgcatggactcgttcatcttgatcgtgccgaacctgctggcgtcctcgcctgcctcaaggtccttgcacaccacagtaatatccgccttcttggcaatgtgatattccagcactttattatagtccatcttgtagaccgcgtcgccggacgtaatgatcacgtaaggttcatgacatctcttaagaaaatccagattctgatatatggcatcggccgttcccctgtaccagtatccgttatccgcagttatcgtaggggtaaatacatacagccctccctgctttcttccaaagtcccaccatttggatgaattcagatgctcgttcagtgaacgcgcattatactgagttaacaccgccactttctgaatgtgcgagttggacatattactcagcgcaaaatcgatcgccctgtagctgcccgcgacaggcatcgccgccacggcccgtttgtgggtaagttcccgcatcttgttgctgttaccgcctgctaaaataagacctactgctctcatactcgttcacctgcctttatcaatgtttctccgctctcaagtattccgtccgggtagtcttccttagatgtaacaccgcttatggcagtattctttccaatctggactcctccaggtatctccgagttctcgccaatggtcacaagaccaaatgaataaaccgacggcttcagtttgttgggcacttccgctccgattcccagcgtaacattattgccgacctttacactctctgcgatgatcgacttgtcgatcacacagttgctcccaaccgcaacgtctttcatgataatagaatccctcacgacagttccggcgccgatcgtaacgcccgaaccgatcacgcagttatgtatctcaccgtatatctccgaaccgtctccgatgatacttctctcgatcaccgcatccccggacacatactgcggaggaataatatcgctgtttgtgtatattttccagaattcttcatataaattaaactcaggaataatatcgatcagttccatatttgcttcccaatatgagccgagcgtaccgacatccttccagtagccgttgtactcatacgcgaaaagcctgtcttccctgtcgtggcagtacggaatgatatgctttccaaaatcacatcccggctcgtcctgaagtgcaaggagcgcctctttgagcaccggccagctgaatatgtagatacccatggatgccagattgctcttcggctccggcggtttctcctggaattcagtaatacggccctcctcgtccgtgatcacgattccgaagcggtttgcctcctccattggaaccggcatggcggcaattgtgacgtccgctttattttccttgtggtaatccagcataacttcatagtccatcttataaatgtggtcgccggacagaatcaatacgtaatccggattaaacgtgtccatgtaatccaggttctggaaaatggcattggccgtgcctgtataccattcgctgctattgcttttctcatacggcggaagtatggtcacgccgccgatattacggtctaaatcccacggaataccaattccgatatgtgtattcagtcgtaacggctgatattgcgttagcacccctacagtatcgattcctgagttaatgcagttgctgagcgggaagtcaataatcctgtatttacctccaaaagcaacggctggcttggccacttttgccgtaaggactcccaacctgctgccttgtcctcctgccagcaacattgctatcatctctttcttaatcatgtcatcaccccttctcagtaattcgttgcccacattatatcatattttttattttgagtgaacaacatttacaaaaaaattgaattttctgttaactttttattaatttattacaaaaaaatacggcttggttttttttgcatatatgtttataataatatgaatagggataaacttttattccaatatctggtccttacgtataattttataaaacaggaaggtatcttatgtataaaatcaattttgaacaaccggtacacgtacattttatcggcatcggcggcatcagcatgagcggtctcgcggaaatactcctcaaggagggatttactgtctcaggttcagacaacaaagagtctgccctgacagaccacctcagcagtctgggcgccacaatattttacggacagaaggcttctaatataatagacggaatagatgtggcagtttatacagctgccatacacgaagacaatgaagaattcaaggcagcagcgcaaaaggggatccccatgctcagccgcgccgaactgctcgggcagctcatgaccaattatgacgtcccgatcgcagtgtccggaacccacggaaagacgaccacaacttccatgctttcccatattctcctggcgggagacctggatccgaccatatctgtcggagggatcctcaaagcgatcggcggtaatatcaaggtcggcacatccggtttatttgtgacggaggcgtgtgaatacaccaacagctttcttcacttctttcccaaaataagtgtcattttgaacattgacgaagatcatctcgatttcttcaaggatctggatgacatcaggaattccttccgccgctttgccgcgctccttccggccgacggaacacttgtcatcaacggagagatcgagaatctcgaagagatcactgccggactttcatgccgcgtcgtgacctatggcacagagcattccatgaattacagcgcctccaatatctcacacaatgaaaagggcgacgcgtcctttgacctcgtaaagaacggtgagtttatggagcgcgtccaactctcagtgaacggagaccacaatgtatccaacgccctcgccgcggtcgcagtggcggatattctgtcagttccgctggcggatatatgcagaggacttaaggagttcgcgggaacaaaccgccggtttgaacacaaaggagaaaagaacggctttaccgtcattgacgactatgcccatcatccgacagagatcaaagcatcccttaccgcggcggcccactatccgcacaaggaactctggtgcgtgttccagccgcacacttacacaaggacaaaagccttgttccacgaatttgtagatgcacttgcactcgcagaccacgttatactggcagatatatacgcagccagagagacagacacactcggtatctcatcccgggatatcgcggatgccctgaaagaaaaagaatgtgacgcttactatttctctacatttaaagagatcgaagacttttgtctggatatgtgtcataaaggggatttgttgataactatgggcgcaggagatgttgtaaatattggggaaagtatccttaagagataggttatccacagtttccacacaattttatcaacaaaaaactgcttttttgccttagaaattacttttttgcctgtccttctaatgctataatatctctacgtaagacataatcatgagggaggactggcgtaaagttatgaagaagctgacattgaccaatcacgcacaagagaagacaaccgtactggaaaacgaatttatcgaccaatacatggccgaggcaaacggagaatatgtgaaggtgtatcttcttcttctgcgccatttaaataatcccgacggcagcctgagtgtttcccagatcgccgatattctggatgacacggaaaaggatgttatccgggcgctcaattactggaaaaaacgggggcttctcgactttgacccggcggagctgaacggcgctccttccgcagagaaggccgccgcacgtactgtaccggcgcatgttccgcctgtccaggaagaatccgctgataagccagcggcgccgcctgccgcagccgcccccacgcagaatatccagccgtaccgcaaccggagggaacgggaggaattcaaagaactgctttttgtggcggaacaatacctcggcaaaacattgtccgcaactgagatcgacaccattacatatttttatgatacgctccatatgtccaccgacctgatcgagtatctcattgaatactgcgtcgaaaacggacataagagcatgcattacgtacagaaggtggcgctgtcctgggctgaacagaagatcacgacagtcgccggagctaaggcaaacaccatactttacaacaaaaactgctactctgtactgaatgcttacgggatcaaaggccgggtgcccgcggcgtccgagatcacctgcatacgccggtggaacgaagaatacggcttttcactcgagcttatacttgaggcgtgcagccgcacaatgaacaccatccaccagccaagctttgattacacagaatccatactaaagagctggctcgccaaaggcgtaaagcatctgaaagatgtggaagcgctcgatgcggaatatctgctcgaaaaagagcgcaaaaagaaaaaagaaacaaaagcagccgcgccttccggcagcaggaacaacaaattcaataattttgaaggccgcgattatgacatgaatgacctggaacgcaagctcgtccagtaataaattcagttacaaaataagttaaaggagactgctgacatggcactttcgaattcccagtacgaatttttaatgcgcacgtatgagcagaaacagctggataacgaaagccgtcttcgcaggcggtacgaaaatgtatatagcagaattccggaattggaggagatagatcattctatctccgcttttagtgtggcacaggcacgcagactgctggaaggagacggccaggcgctctcttccctgaaagaaagcatagcggaactctccgccagaaaaatacagctgttaaaagctaacggatacccggacgattatctcgagcttcattacacgtgtccggactgcaaggacaccggttacagaggcacgaaaaaatgccactgctttaaaaaggcgatcgtcgacctgctgtacacacagtctaatctgcaggaaatactggagaaggaaaatttctcgactttctgcattgattattattcaagcaaccacatcgatccggtgaaaggccgctcttccagggaagccatagaaaccgccctgaaggcatgccgcggattcgtggatacattttcttcagagtttcgcaacatactattatacggagacacgggcgtcggcaagacatttctcacacattgtgtcgcaaaagagttgatcgatgactcattttctgttatatattttactgcggcccagttattcgacgtatttgcacaaaatacattcggcaggagagaggacgcaaaggatgactcctttgaacacatctacagctgcgacctgcttattatcgatgatctcggcactgaactcccgaactcattcacgacctctcagctgttcgtatgcctgaatgaaagaatacttcggcagaaatcgacaatgatttcgacaaatcttgcactggaagatttgaaatccatatattccgagcggacgttctcacgtctgagcagcaactttaccatgctccggctcaccggagacgatataagaatccaaaaaaaattattaaacctaggaggtacaaaggatgttacgccgtaacgaacgtaatttggaaaatataccggtgggggctttgggcatcatcgctctcgacgggtgcaaggagatgggcaaaagggtcgacgattatatcgttaaatggcgccgtgaagacgggccggaatacaaaaatgacatagtattcaacggatatgagcgcgatacttatcttgtaaatgccaaagtaccgcgttttggttccggtgaggccaaaggtattctcggagagtctgtccggggaagagacctgtacctcatggttgacgtctgcaactacagcctcacgtattccctgaccggacacacgaaccatatgtctccggatgaccattaccagaatctgaagcgggtcatcgcggcggtcggcggcaaaggccggcgcatcaacgtcatcatgccgtttctctatgagagccgccagcacaaacggagcagccgcgaatcactggactgcgcccttgcgctgcaggaactggtcagaatgggcgtagataatatcataacctttgatgcccacgacccaagagtacagaacgcaattccgttgagcgggtttgaaaccgtccgcccgacctaccagtttatcaaaggtctgctgcgtcacttcaaagacctgagcatagacagtgaacacatgatggcgatcagcccggatgaaggtgcgacggagcgggccatctatctcgccaatgtattgaacctggatatgggcatgttctacaagcgccgcgactacaccaggatcgtaaacggccgcaacccgatcgtagcccacgaatttctcggttcctccgtggagggaaaagacgtgatcattcttgacgatatgatatcctccggcgacagtatcctggatgtggcaaagcagctgaagcagcggaaggcgaaaagaatctttgcggcggccaccttcggccttttcacaaatggaatggacaagtttgacaaggcttatgaagaaggcctcttcgacgctatcctgacgacaaacctcatttaccagactgaggagctgctcgaaaaaccatattatatcagctgtgatatgagcaaatacatcgcccttatgatcgacacgctgaaccacgacggttccatcagcagtattctcgatccaaacgaaagaattcagaatgtcctccagaaataccggagaggcgaagaaatatagttcctgatccaaaaataaaaagacgtggagttctcagcgtaaaacctgagtgctccgcgtctttttatttacagacaggcagatccatacatccgtccgtttttatttttgccttctcttcagatattccagcgcttcccttacattttcctccttgtcggcgtcgttcagccattcaaatgaaatgtatccgtcatatccaatctcacagagcgcctcgagtatcccagcccagtcacagatcccggctcccaccggcagattataacaggcgagcccgtctccgtcgcaggcgcgtacgtgagtcagcctgccgccatacttatggacggcccacggaagtatctcccgctggataaatgcctgggccgtgttaaatgatacgctcatataatcgcctttcagctgtttcagcatcctgagcatcgtatccgtatgaggcgccatcgtattataccggttctcgatcctgcacggcattccctccgcacgggcggtatcctcggcccgtttcattcccgcgataaaattctcccagtatgtttcccactcaaaatcgtccggaaaatagagccggaatttagcgtcaaatctccacccttccacgctcctcgtctccccgcccggcagaaccatgtccggcagattcaggtaatagtattccggaagcgtggccgtcgtcctcaccgtaatatcgtcctgcggatacggggcggtaaacgaaaccgcgccggctccgagctgttttgccagccggcagactctgccaagattttccacagcgcggtcctgttcttcggggcgcagacttgccagacccccgatcatattctggaacatacacagctgtattagctccagcccattttgttccagcaattccttcatatgcgacaccgtgtcatctgtccagtacgcctccagttccctctcgtcatccaccataagctcgatcccgtcaaaaccggcctccgccactttctttaccgcctcatcataaggtgcatgataatccggttccataagagtccagacggtacatccatattttactgccatattatgccctcctttcaccggcttctcacgcgtcaatgagcgccctcaagtattgcagcgcttctgtacagtgtcttgtcttttccgagtcatgggcccactccagagacaggtatccgtcatatcctatgtccttcagcgccttgaccacttcctcccagtccgtattgccgtaccctaccggaagattatacgccgccagcccgtcgccgtcgcgcatatggacgtgatacagccgctttccgtacttatggacagaccacggaagatattccctctgcagatatgcccacactgtgtcgagattggccccgatattatcctctcccacctcttcgcacagtcgtatcacagaatctgtgtgaggagtcatcgtgttggcatgattttcgatggcgagtctgaacccataactttttgcggtctgcgtcacccggcgcactgcgtccacatggctttcccagtaccgttcccaatcaaacggctttggaaagttatacttcagctttgtctggaacgtctgaagcgcgcggatcctcggatccaccccgggtacattgatataataatattctggaagataagaattcggagcagttatgacatccggccatggagatacaaagttcacaataccgcaccccagatccgcgcttatctcacaccccgccttgaacgcgtccacagagcgctctattctttctttatccaggctcgcaagcccgtccatcacattctggaacatggcgaactgggatacctccagtccgtaataatccagcattctctttatctctttccttttttccggcgtccaataaccatggatgtcctcaaaatcacggaggatcagctccattccgtcaaacccaagctccccgatggagcggatcgccccttcatacggaggattgtgagccggttccgtccatgtccaggccgcacagcctactttcatcgccatatcatttctccttctttctattcttttacagctcctgacatattatctacaaaatagttctgcaccaatgtaaacagcagcactgcaggtactgctatgagcgtacaggtagccatcattcctccccagtctgtgcttcgcatgccgacgaagctctgaagtccgatgggaagcgtatattttcccggcgtggtgatgagattcaccgcaaacataaattcctgccatgcctgtacaaatacgtagatcgcggtacatacgatccccggcatcccaaggggaagcagtatcttgaaaaatgcttttgtcggacttgccccgtcgatggcggcagattcaaacagctctttcggtatgcctgtaaaatgtcccgtcatcagtatgagggcaatggggatgccggttatcgacgccgtatatgtcagaataagtgaagcatatgtgttctggatccccatcatccggtatatcgtcatgagcggcaccatcatcgtgatcgtcggaagaatctgcattatatatagaagatttgtcagcatctttgccggagcaaacttgaaaaagcacatggcatacgccgcaaacgccgcgatgatcacagtcagcagcatagttgcgatggtgacgatgagactgttcctcaaaaatgtaagtacatcatattcacggaatgccgtgacataattatctaaggtaaatgtatccggaaacaatttgggcggatatgtcagtatttcatccttcgtcttaaatgaacttatgatgatccaatatacgggaaatataatgatacccaatgtaacgagcagtgaaaaatactgcaaaatctttgttgtcagctttttattcatgataccgcctccttcctgctcattttcaaaacagctgcccccgccttaacagccgcgaagcataccagtatgatcacaagcgcgatgacactcagcgcagtggcctgggcaaaattaaagttctggaatccagcctgccggatgagatacggcaatgtcgtcgtggcgccggccggcccgccgttcgtcagtatatatataattgaaaatgaattaaaggaccagacaaaaagcagcatcatacagcggctcagtatagggccgatccagggcagcttgatataccggaacgtctgcagcgcattggcgccgtccatcttagccgcttctatataagagtccggcacagcgctcaatttggcatatgtcatcacagcgacaaacggtgccgtcctccacacattcgccataatgaccatagccatggcaaggacgccgtcaaagaaaaacgacgtgccgtccgcaataagtcctgtctcacgcagtatataatatatcatacctgtatccgaggaaaacagccatttccacacatatgcagttacagattccggtatgatccacggcataagtataaaggctttgatgagaatgctccctttgatccggaaggtcattacgatcgcatagaacatcccaagcagcatggtcaggcatacacagccgataataaaaacaacggtcagccgtatggcgctccatgtgcccggattagacagcacatctgtataatttttcataccgacaaactgaagctttcgtccgttcatgctgtagtttgtaaaactgattcctatgttaagcacaaacggacagagcataaacagaaatatcagaataaaaaagggggtgctgtacaaatatggcatgatattattcagtttttttctcaaagttatcctctcctgccataaagggccgtacgagccggccctctcttttatttattgtcatcaattactttctgaattgtgtcgtttgccagctttgccgcatcggaaagtgatgtcttatcatcaaatgtgatctgctggaatacagggaggaatgcggtggtcatctcgctcctgagctggaagccgaccggtgatatcgccacgccatactgcatcagatcctgaaattctggataatagctcttctgctcttctgtaaaatgctcttccgcatcttttcttccgcttaagcctgctgtcatttttcccgcgttttccgggtctgccttgtattcaaggaacttaaatgccatgtctttattttttgaattggcaaatactccgagattccatccgctcataagcgccacctcgctgcctgagcccttcgggaacggcgcggtcacgagcttgcctctcacgtcctcattcagcgcgtcatacatccaggctccgccgatggtacatccggcatgccctgaattcagcgcttcatacattgcagtgtcgtccatggtcgccagcgtatctccatctattgtcgcaaagatttttctcgtgttctcgatccatttttcaccggtcgcgttatttaaatcagccttccagctgtccccgtcttcttttacaaaggctccgccgtcggtgaaaagaaacagccccatgagctggcacgcgatggcagtagaattatagcgcactgccaatggcagatacccctttgcctcagctttttgacagtagtctatgaactcatcgatcgtagcaggcggattctcgaatccgagatcatttaacacatcggaattatagatcgtcgtctgcacgtctgccacctgcgggatcgcataaacagaaccgtccaccgtatttctttcgatcgttgaatcgataaaatcatcaaacttcagtgtctctgatttttcttcatatttatccagcggctccagcacaccggctttggccatctgtgacacaaaatcagtctccacaaacaccgcgtcgaaatcatccccgccgctggccgatacattcatcagtttctgatgcagctccgcgtacggcgtctcaacaaagttcacttttacattatacttatcctcaaaacctttgatattttctgtgatcaatccaccgtccgtaccttctgtacttccgtcaatgaggatcgtcaatgtctcttttccttctttttcgtccttctgtgcgctttcctttttcccacaccccgcacatgccgccagcatggataaaacaagcgcgatactgatcagtttcttccctttcataataaatctcctttccttgtactgcagttactctatgtcaatccagcagttctttaaattgctttcataacatgcctccactatctttgtcacataatatccctgggcaaaatccgcgtaccggtacgtgctgccgggttcctgtatggaatggtaaaaatctttcagcgcgtttgccagcgcatctgtccatcctgccggatgaccgtttggaagcacggcattcacccgggcgtactctgtcagatatttccggtccgcatacaatatctcatttgcgctgtctctcttccctataagaagtctgtccggcctttcctgttcccattccacagattccttatttccgctgatgagtattttcatgccgttctttttcccggcacagacctggctgataacaagcgtcccctgcataccgtcttccatctgaaacaatatagaagccgcgtcttccgtctccaccggaacgattccggcgcgcccttctttcgggccttctgcaaacgttcctcctcctttatactgcttccgctccgggtacagtgtaaaatatctggcatagacagacgtgatctttttccctgttataaactgtaccgcgtcaaagcagtgggagccgatatcgcccgccgccctggaatcccctcctatttcttttcggatcctccagtcaaaatctgtctcatacagaagccagtcctgcaggtattctgcctgtatatggcttgtcctgccaagccgcccctccgcaaaccgccctttcatttcatgtaccatcacattgttgcggtaattaaaatttacggccgaccggactccccttttggctgccatctctgtcagttcttctgcctcggacgatctcagtgtaagaggtttttcgctgtagatgtggcagccatgctcaatggccgctttattgatctcaaaatgcagatgattgggagaacaattatgtactacgtctatgtcttcttttgcgagcatctccctgtaatctgcataatagttaggaattccgttctcttcgcaccagtttccgacagagggatccgggtcggatactgcggtgatcttcacgttcggcactctgcgcaccgcctccgcatgctgtcttccgataaatcccatgcctgtgaccgctgtctttaatacgttcatgtattatcacctcctatatactgtgacagatatctgcggctgatgagaagcgcctctttgatcccttccggcgaaaattcaaacgctttgtcctctatctcgatacatgccgcgccttcatagcctatatccagaagcgccgctatatattctccccagtccacatcgccgtggcccggtattctgggcgtcatatactgaagaggcggcgccatcacgcctacatccgacagccggtcctcatgcagcttgatatccttgtagtgcacgtgaaagatcttgtcgcagaactcatatacaggcctgatatagtccatcttctgccagacaaaatgcgagggatcataattcagcccgagataatcactcggaaggatcgaaaaaagctgtctccatatcgccggagtagacgcaaggttctgcccgcccggccattcatctgacgtaaaaaacatcggacagttttcgatcgctatgcgtaccttcttctcttctgcaagtcttacgatcggctcccacactctctcgaactctttcaggttgtcctccacacttttatctgtcattcttccgataaacgtggacaccatatgtattcccatatcggcggaagcacatataagtcttttcaagtgacggatgacgtattctctcttttcaaggtccgcatccataatgttggggtaataggccagagaagatatcgttacccccctctccctgcagtagccaagtacatactgcatacctgcgtcatccagtttatccacatcaatatgcgtgactcctgcatatctcctgtcggctttccccttcggccagcacgcaatctccacacaggaaaaaccattctgcccggcgaagtccacaacttcttcaaagctgagccctccaagcgctgcgctaacaaatccttgtctcatttctgttcccttctttttgcgtaaattttacatgtttttgtgtaaattattatgtttttattataacaatattgacagattttgcaacatcttttataatattcgtataattgttgtttcgttttcctgttttttagtatattttgcacaaatccacgtaaaatttttacatattgagaaaggagttttatgagttcttacaagaaaatcacgatttcacagatagccgagaccgcgcaagtatcggtagctacggtctcaagactcatcaacaagacaggctatgtaaagccggagacaaggaagaaaatactggacgccatggatgaactggactttaatcagaaaaatccggattccatccggaataccaactcaattcttgtctgtcttcctgactttcacaatccatttaacggagatgtcatagacggcatacagtccgtcgccctgagccgaggataccagaccttttactatgaagcaaaggattttaaaaatgcgctgtccgactacgagagtattctgaaaaagcatcagttttccggcatactgctcgttcacaatgtggtggacctggaacttctggacgacctgcgtcttcgtttcccagtcgtcatgtgttctgagcactgtgacagatccaatgtatcctttgtgtccatcgatgataatatcgcggcgcagaatgccgtcaattatcttataacgatcggacgcacgaagatcgcatttatcaacagtatgctgaaaaacaactacgcgaagcaccgggagaagggggtactgtatgcgctgaagcacgcggggcttacgttaaatctggactggatcgcccatatagcggacattaattttgacatggccgtatctgccgccgtcagtatgctgtccatggaagaacggccggacgcttttttctgtgtgtccgacgtatatgccgcggctgtcatcaaagccgcgcatagcctgaacctgcgcgtgccggaagatgtggccgtcatgggatttgacaacatcagcctggcaacgatgaccgtcccgtcgcttacgacgatcagacagccaagcttccagatcggccagcagtcgtgcgatatcctcataaaccagatcgaaaatccgtcctccgccatcaaacatgttatactcgatacagagctagtgatccgggattccacaggcagccggataaattgaccggacaggatatgtacaaagcggcggcagggccacagagcgcaaatgctctgcggccctgccgcctggtcttgtatgttacttatatttttcggtattttattccaagctcatccagaatatgttcttcccgcttctggcatgtaaatatgatcacctgttttttgttttcagcaagccatctcagcgtatttttaagccgcacatcgtcatagtacacaaaggtatcgtcgaggatcaccgggtattcctcctcatgcagcagcccggccgacgccatacgaagggcaaagtacgtctgctctatagtgccgcggctcacctgttcaacaggtattttcctgcccccgcagatgaggttcatatgcagatcatcttctacgacaagtttcgtatacctgcaccctgtgatctcgctcatgatctcagatgccctgtcatccagcttctgctccagctccttttgcatccctgccgcaagttcgcttaatctttccatggcaagcctgacgccctggatattacgctcctgctccctggacatactgctcacttcatccagctcttcgagctgctcccgcagattatcgtactgcacctgcttctcccgcagctcttcacagacatggttcatctcccatctgagcttctcaaggggtatcttttcttcctccggcgttatctcttccagaatgatctccggttctgttttgaccgtccttttatctaccttcatgcggttccacacgtagattccgcacagaagaaagaggatgatcgccacgagatagttccacggttttggaataagcgcgaacgcaaatacaacaacgaccgcgaacaggacgatctcgaccggatggatgcgccatttgttcgggcgcagttcatcgatcacccccttattctccggttcctcctgcctttcgcgctcctttttcctccgggattccagctcctcaccgatccgctcccgttctccttccagccggtggacgtcgcgccacacgtaggaagcttccagctcgatcttctctcttttgcgatgcttctcctccagggcctccttggcttcccgctcctgctcccggagccgggcccgcagggcgccggtcgctttttccatattaatatcactgctgccggccgcataataattggacgcatagttcttaagctctgccgccagcgtctgtcccggttctgccttcagctgtccgacagatacggtgttgtcatataccgccctggtgagtccgcccagaatcatctccagatccccgtccgccacagaaagctcttccccgtcatcctcgcatatgagttccgcgctccttgaatatctgtcaaagttcctgctcaggcagaagctttttcctccgctttcaaacttcagtatgccggaataataattcgggttctcccacggttcgtacgtgctgaacgtatcattggcggaggctcttcctctcccccgctccagcccgaacaacatgcattttataaacgtatgtaaagtagacttcccggattcgttctccccgtacaacaggttgacgccatcggaaagcgctacatttttgtcttttatttttccaaaattctttaccatcagttctttaattctcatttaaagcctcttctcgtctccatcaatgcctgtacaccttcgcaaagcgcacagtattcgatactttccttatccccggtgttcaggttctgaataaactttccaagaagatttcccttgttctgttcgtacagtctttcaaaatcataggccggtctcgtattatccacgatctcaatgatatttccgtaagagtccatgttcgtcagatcaaataatatttccgggtctctctgcccggtcagtatgatcttatatatattttgaacgcccttatcttcgaccgcgctccggatcgctccgcgcacaccgtatccggtcatgttttctgtcaccggtatgtccatgtggatatattctctcgccgcgcacggaacaaaggaagccgtacagccgctttctgtaagctctccggaaatatatccgtgggcgccggtatcgttcttgtctgtcggctccagtgcgccgctgtaatacgctctatccgggatgagctgctggggcttatggatatggccgaacgccgcataatcgtacccgagtttcgcgatatcccccgcccggaacggtatgtgcttatcgtcgccgccgtggccgagcaggatctcatacttctgctttccaaaaggcactgcgcggtcataagctctttcggtattttccttctgaacgtagctcaggccgtataccgcaagatcaagccgtggaacttccacgcatgtgatctgttcactccgtatcatatgcacattttccgcccaggaaaatgtccggtaataggaatcttttttcagataatcatggtttcccgctatgataaatacctccgtatggggaatgcctgaaaacagaaaatttacttcttttaattctctcagcagcggctgccggtggaacagatcgcctgcgatcaggagaacgtccgtctcattttctctgcaggcttcgatcacccccgcgaagctattccagatctcctgtgtcctgcttttgctgtatgcgcttcctgcgtccgggcttgcacctaaatgtacgtctgcgatgtgtatgaacttcatctgctgctccttcttcctctatgtttttagacggcagtgtcacgataaactgcgtctttatgtcgtcactcttcgcacggatcaggcctccgtgaagctccacgatttctttggctatcgccagtccgagtcccgcgcccccggtgccgctcgacctggaaccgtccacacggtaaaacttttcaaagatcgtctgaagcatcgtccccgggatcttgtcgccttcattggtaaatatgatctctatatctccccgcttcatctgggcgccgatctctatctttgtatgatcgtaacaataggctatcgcatttcttaataaattgtcaaatacgcgggccagcttgtccggatctccgtatacttccaggttctcctccacctgcacctcacacgtcaaatgcttctcctgcagcacgccgtacagttcatccgccagctgctcaagcatcatggacaggttgatctccaccggctccagttcgatatcctgaagattatatctcgttatgtcaaaaaactcattgataagctccccgagccgtatggatttctccagcgacacgtggatatatttcgcccgctcttcctccgccatctccgggtagctgtcaagcatcgtcaggtaagctactatggaagtgaggggcgtcttcagatcatgggccagaaatacaacgaggtcatttttcttcttctccccctctaccgcctccagctcctgacgcttcagtgtggccttgatctcattgagcctgatctcgatcggcttaagctctgtgataagatggatcggctccgtagagtcggacaggatattctcgatcccttcccccacctggtccagatattttgtcatcttcgagagcgccacatagaaaaataacgcaaataagagcagaaaaccgacgatcataaagaaggtcttattgtttccgataagcctccagtataaatcgatcgccgtctgctctttgacatttagatccatcataatacggacgaacgccttggcaaagctgtcattatagataccgtcaattatataattcagtataaatccgcccacgagaacagtaagtgctgtgaccagcaccgtctgcaggaggatactgaattttaacttccgataattattcttcaaccttataacccactccccatactgtcttgatgaaatctgattttccggtcggcgcactcatcttctccctcagatgcctgatatgcaccatcaccgtgttgttgctgttcttataatactgttcattccacactttctcgaacagctcctcggaactgatcacttttcctctgttctcgcagagcagccagagaatatcaaattcgatcggcgtgagcgtcagcggaacctcattgtagacgcactcatgtgaggtcctgttcaggaagaggccgccaaagtcaatgatgtcgccctcctccctgctgccgtcgttgtactgcgtgcagcgccgaagctgcgccttcacgcgggccacaagctccagcgggttgaacggctttggaatatagtcgtccgcacccatcgtcagtcctgttatcttgtccatatattctgtttttgctgtaagcatgatgaccggaaatgtatatttcccgcgtatctgcttcaggatctggaagccgtctatatccggaagcatgatatccaggatcgccaggtcgatcttcatgctgccgatgtaatccagcgcttcctgccctgtataacatttgtgtacatcgtactggtcactctgcagataaagttcgatcacatctgcaatttccttttcatcatctaccaccaatatattcatacttaccctccaggtaaattacagctcgcagttgtttaccgttctcgggaacggaaccacatcgcggatatttcccatacccgtcagatacatgatgcaccgttcaaacccgaggccgaaaccggaatgtctcgtggaaccatattttctgaggtcaagatagaattcataatcctcttccttcagatccatctccttcattcttgcgagcagtttatcatagtcgtcttctctctggctccccccgatgatctctccgatgcccggcacaaggcagtccacagccgcaaccgttttcccgtcgtcgttctgcttcatataaaatgccttgatctccttcggataatccgtcacaaataccggacgtttgtatatttcttcggtcagatagcgctcatgctctgtctgaaggtctgtcccccaggatactttatactcgaatttatcgttgttcttctccagtatctccaccgcctctgtgtaggtgactctcgcaaattcggaggacactacgttgttcagcctttccagaagtcccttgtccacaaatgaattaaagaaattgatctcttccggcgcctgctccagcacataactgatcacgtatttcagcattgcctccgccagcatcatatcgtcatccagatccgcaaaggccatctccggctctatcatccagaactctgccgcatgacgggtcgtgttggaattctccgcccgaaatgtcggtccgaatgtatagatattgcggaacgcctgggcatatgtctcgccgttgagctggccgctgactgtcaggcttgtctctttgccaaagaagtcctgggaataatcaacctttccgctgtcttctttcggaatgctttgcatgtcgagcgttgtgacgcggaacatctctccggctccttcacagtcacttcccgttatgatcggggtatgaacgtagacaaaccctctctcctggaagaacttgtggagcgcatatgccgtgagggaacgcacgcggaatacagcctggaatgtattggtcctcgggcgcaggtgcgcgatcgttctcagatattcaaagctgtggcgtttcttctggagcggatagtccggcgcggacgctccttccactgttatctcttttgcctgtatctcaaatggctgctttgcctgaggcgttgctacaagtgtacccgtcactatgatagcggcccctacgttaagccgggatatctcatcaaaattatccatcgtattgtggtacactacctgcagcggctcaaaaaaggtcccgtcattcacgacgataaatccaaatgccttggaatcccggatactgcgcacccatcccccgactgtaatgtccttgtccagatattcgtctctgtttttatacaattctctgatagttatcaaatccataccaactgactcctttatattattcatgttgtcattataacacatccgtcaaggagggtgaattgaaatttacatctattatataattgaatctgcggcgcggctccggctctgcctgccctgacacacttcctggggatttttcggacattccttgcatttatcccctttctgtgctatactacaaaccgttcaggagcccataaaaccaaggtctgaagggctgtaactaccgagtgttcgagaccttccactcgtaaaacaaaactaaaggagaaagaaaatgaacaacaagaatatctcatttattacacaggcagctatgatagctgctatctatgtggtgctcacttatttctttgcaccgttctcattcggagaagtccaggtaagaatcgcagaagctctgacgatccttccgctgtttacccccgccgccatcccgggattattcgtgggatgcctcatcggaaacatacttgggggcgccatacttccggacatcatcttcggaagcctcgcaaccctgatcggcgcagtagtcacccgccgtctgcaaaacaacaataagttcctcgcaccgctgccccctatagctgctaataccatcatcgtaccgtttgtcctgcgtttcggttacggcgtagcgctgccggttccacttatgatgctcactgtagggattggagaaattgtatcctgcggcgtacttggaatggttttatactttgctttaaataaatataaaaatatggtttttaagccctgttattaaacggggacacgtcgaaacgaattggggacgggggttttttaaaaaacccccgtccccaattcgtttcaacgtgtccctatttgatgtatcctatatacgcgtggccgctgccctgtgtcatttcgtcaatgccttcgtatgacgcattccttttctcaccgctggcggtatctacataactaatcgtactttctgtataaccggtaaggattatggatgtggatgcatccagcatggcgatgaccggtatatcctgattgatgacgtatagcaattgttccgccgtgcatccggtgtaatccattcctctatccttcgatatttcattcattatctctatcggggcatccccggcgttcagacgttctctcacagactggatctcgttgtcttttcctgtgatggcatgctgcaggtctctgtttccccgctcccatatataagactggcgggaggatataacgacgccgttatattcattcgccttctgtattgcggcgcctgctttttcatatatgccctgcagttctccataaccgtacacataacattttgcggctgcatccacgtcgtcaaacgttatagcggtaggattttcaaagaggacttgtttgggcttcagcacttttggctctttatcggagattccgtcggcgtaagtgagccggtactgtgtctcttttaattctgtcacatatgattcaagataaatattactctcttctttttcttcattgttcgtaatataatcatccgcgattcctgtatacgtgcttccgtcttttctgactctggaaagggtgatcatattattgtcaaattcagcttcaagcacatatatatctttttgttcatatgtctttatgactttactcttcccattttgtatttctgtcttataaaggggcactacggtctccccggaaactgtttttccggtatctgacgtcctggcaactccatatacaaaatcattttttacaaatccaagaggacgtacaacttcaccgtctgcgcatgtcactttacgtttcttgccatttgcgaaattgataacctgtatttccgttgcctccgtcagctttccgttggactgatacgctatcatatggccatcgtcagagactacatactgcccttcctgcagcccttttactattacttccttcgtctctttcccttttttctctacgtttacttcatagagggtcccatcgaccattacatacagcatctctttatccacgctgtagtagacgaatctgccgagttcatacactgccgtgccgtatgacttgtcacttgatataaatgccttctcctccacggagttctggtctatattgtaataatagatggcaacgcccacttcgccttcatgttctcccctgttcatgtaaccgtacaccgcgaacgttacatttccctcgtcgtccgatgccagaagctttacttcatgctttgccgtcagacttcttacgtctgtattttcagcgtcggaaaagctgaacacaagggagagctcgtccgtatctttattataattccacagctcgtcagcctgcacgaaggagactatgctgccgtccttgctcaccatatactgcacatcatgtgatgtgatcccgagcagaacgcctttctcactcagcactttcctggtcggatcaaagatctgttccattgtcctgtcatagtcgagcagatatgtcttctgcgcatctgcaatatggcggacgcggaagaattctttcgctttatatacatcctcctcgttctcctcccctttgcagcgcaccttatattccagctgcacggaggtgtatgtgctgtttgtctccttgatgtaccagcgctcgccgccttctaccgacggctcaaggcttccccatgtcacctggttataatcggaatggatcgtcacatgctgaaatgtggaattatctccttcctcatttggctctattgccgccccgacgccggttccttctgccttagccagcgcattttcatgaaaatcactgatataattcagacattctgccacattgtcattggaagaatctgcgatacgtgtataaaaatataccgatctgtctccatccagactcagcacgatctccagtacccgctcctgcgagagcagttccccgccggtcagctccagactgacatttttcccggcctttttcactttcttttcaaacagcttatctttcccgtccagcgtatacaccgcatatttaagcctgttgatcttattgtcataggcctcaatgttaagatccagcgactgtccgcttaccggcgtgatagtatctctcatggatggtatgtccatcttcttggcatagcctgacaacagattgacattaaacccgtcacaggaaaatgatacctgcggataggtcgtcactcccatatctgccgtcatattgtcgtttccacgatttgtgataaaactgaatacaaatacggccgcaataaaaacggctgttaatatgccggcgttgatcaatcggttctttatgttcattacagttcccctttttcatctaacaacctgcccaaggctggtgatacatgaagaaattcttcacatatatttattgtatcctgattttccccttttcttcccgtcttcaccgcacgaatcaaaatatttttcggcgtgtgctccatatcgataaattccagtatctgggcgtcataccccctgctcacaagatattccgcgcgcagtccgtcggtgaccaaagccgcaaaacgctcttttaaaagcccatacttcataaccgggccgagcacatcattttttatctggctgttcagctcatgctggcagcacggcacagacaggatgaccttcgcatcccagccgactgcctttgccagcgcatagtcggtcgctgtgtcgcacgcgtgaagcgtaacgaccatatccaccttatccgcccctgtatagtcggctatatctccttctaaaaaatgaagcttgctgtatccgtacttttcactcagctcattgcatcggcggatcacatcgctctttaagtccagtccgattattcttacatcatatcctttcagctcatgcagataataatacatcgcaaatgtaaggtaagacttcccacatccaaagtcaaggatggaaacctctttccccttgtcaagctgaggcagaatatcttcaataaactccagaaaacggttgatctgccgaaatttgtcgaatctggcattcacgaccttaccgtcctctgtcatgacccccagatctttgagaaacggaacagcgacaccttctttaagtatatactgtttcttcctgttatggcttatatccgccggcccggcttcctttttccggctttttctcccgaccgtgactttgcccttcttgcttataagtaccgtataaagcgcctccgaagtctccagctgcatctgcttcatattctccatctgttccgctattataaagccggcttcctccatcgccgcattccggtgaaatgcctgattacccttgaatacctccagctggatcatccgttcatccttaatgagaacagggcgcacctttatcttggacggcccgtccgccttccttggattactcaaaaccgcgtttaaaaaagtatcgtttaaattttcgtttaataattttattatctcttccataatagtatattgtactgttttttccatatataagcaagttggggacgggggttttttaaaaaacccccgtccccaacaaaaatcattcgttttccacattttccacagcttttgccacacgcggaaatgttatcgtcactttgaacaggtcgccgtccagatacaagtcaaacgatccgccctgcatggatgtcaggctcttggctatggataatccgagaccgctgccttccgtgcttctggacacatccccccgcagaaatctctccgtcagttcgtcggccgtaaaattaagcggctggtctgatacgtttttcagactgaaggttactgtcgaatccgtgatcctcagatcagcatacacccgggttccttccatcgcgtatttggcggcattgttgtatatattttccagcacgcgccacatgcgtcttccgtcggcacgtatgaccgcctcttcttccggcaggttcagcacctcattcagatttctctgcgtaaacttctcttcaaattctccgctcgtctgctgtatcatctcgaccagatttatattcataaagtccagtgttatattcccggagcttaccttggacgcctcgacaacatcttcggtcagcgttttcagccgctgtgccttggtctccagaacttccaggtatctctgtatcttcggatcctccaggtgctccagcttgagcagatctatataattgatgatcgaagtgagcggtgtctttatatcgtgggatacatttgttatgagatctgtcttcagccgttcactcttcatgctttcttccagcgccgcgtcaaggccatctccgatggaattcaccctctctgccagcatcagctgctcgcctttcagaccgtcgagcggtatcttgtaattgacttcaccggatgagatatgctcaatacccgaccggatcttctgccgggcaatggacatgcgtacaaggtaaatgaacgccagcgcctccacgatcagcatgaccaaaaaccagaaccagttgacaatagcgccgctgagcactgccagccaatgtacgaacccgaacagacagaacagtatcaccgtcttccatacgaaatgcatattgacgaacagctgctttataaagctgcacagactctttattatactgttgctccacacggttctcgtctttatcctgcgcacaagactcatataccctatcaggaacagcccgcatgtgtatgcggctacgataccgcttcgcaccacgccaggaattgcattatagctgtatacggccatggcataagtatcactgtaatccggaacctgacccgcaaaatattgagaaatgccgcttcccacaaacagcaccggccctatccacagcattatcactaatgccgcggcaagctctgtcttccatctgtcaaaccagttcaggtgcagttcttcgtctctgttatttctacctgctataatcgtcagccagacgatccccaccataaacaggatcgctgacgtaaggccaaggatcgctatgccctggatccgggaaccatatttctcatatattttattttgagaataaaaactgtcctggatcggataggacgtatccacacctaccgcatatacaaaattctcctttgccggcccgctgaaccttacaaggtctttccatgtagctgcgtcttcgttctcaatatttgacgaaaagtcagacagcttcggctttacgatcagatatttcccgttctttgccatcgccttgagactttcatcaagcctgctgaagtccttgaattcttctttgtttgtatatatctttttatttaccgtatcggcatacagatagactagattcgtgtccccctctttccagctgttctcccacgactcatatgtttccatccggttatatatgttgtataagctgccctccagcatctggaatacatcgttgagcttcccgttccatgccgggttctcatttgctatctcaagcaggtttgccgcaccgaggggcgcatatttttcttcgatctgatatccgtcataattccaacagtctataaattcaattttgccttcccggttctgcaggcccttgaattcagcttctgtttctgtgctgtacattacgtcgcttcttccgccgttgcgaagctcgtagaggatctggtctgaagatacctcttcaccgctggagttatttgcgatcacaaaactcagttccccgtcattgacaagttgttccagctctgcaaaataataataccggaatgttccgtccgaccgcttacatacaataatcggttccttactgtcatctatgatattgccgtccgaataaggagagctttccgcccattttctcagatcccccagtctgtaagccagaccgctgctgtttttattattgatattatcattatcataaaattcttttatatctacaatacgttccggatcgtatctgccctctgtctcaaatagtccccgcgtgttaacgccttccagtattccggtcgtggccgtctgaagctggccgctgaacgcagtagaatcctcaaactttttggccgcatgccctgaaaacagatcccccaccaaagcggggtatgtcagaacccagaccagactggctgcagctacaactgcaaggacatgttccgccacgatcaagatcccttttgtcagattggtcttataccattgattcatataaactcccttctaaagtttctccaccttatatccgactccccagaccactttcagataacgcggctcctttggattgatttctatcttctcacgaatatgtctgatatgtaccgccaccgtattatctactccaatggcatcttcattccagatattttcatatatctggtcaatggagaacacttttccctgattttttacgagcagcaataaaatattatattcgatcggcgtaagcttaacaagctcgccgtccaccgtgacctctttgagatcgtcattgatagacagacccccaacctcatataccgcctgactgtcaccgcttactgtacttccaagctgagtgtacctgcgaagctgggatttgactctcgcgacaagttccagcgggttaaatggttttgtgacataatcatccgctcccacattcaggccaagtatcttatctgcgtcttctgattttgcagacaggataataataggcatattattttgttcccgtatcttaagggtggctctgattccatcaagtcttggcatcatgacatcaatgatcagaagatctactttttctgactgcagcactttaagcgcctcttcaccgtcatatgcctttaatacttcataaccttcctgtgtcaaatatatatcgatcgcttccacgatctctctgtcgtcatcacatactaatattttagacattttcatcacctcccttatactatacaagaatagcagggaatttttaagagcttcgacagaaatttcttaagattgtatgaaaaaggcccggatcctttcagaatccaggcctttaaacaacattttgatcagtataagataataccggcgttatatcggagacaaataatcagaataccggatcccgtcgcatgtgcttacagggctgcgtcacaggcggccaccggtatccatgtcatttctatttctcagttccggcagatacggctgccccacacggacaaaatcccagtttcatcccgtagtatcattggaatccgaaatctccaagcaactctggcctgtatggcctatgcacagttataaaaccggactaatcactctcccgctgtccgcacgagacagaccgcactccgaaactgatatttatatccccgtcagagccggcattatctttttttatcatatcgcgcttttttaatctgcacaatcctttttatgtcatataataatgtttttataagattatacccttatagtcgttcctgcgtatatcaggttcgggttctggatcccgttcagccgctgaagttccgccactgtagtcccaaagcgcagcgcgatcccgctcagcgtatcccctgatttgatcgtataataccgcgcggaagtttcataatgtccgaccgggatccgtatcttctggcctgcatagatcagatttgggttttcaatattattataagaagccagtgtctgatatgtcgtaccgtacctggctgctatactgctcagattatcccccggcttcactgtatatataatgacatctgccggagaagacggcgacggcgcaggcgtcgtgacttctccttttattttgtttaaccctgctttggagatcacacttgccagatcataatacgcaatattttggtctacatttcccgggataccgcttatactcccgctgtcgctgtactgccacatcgccataccgctggcggacggctcattcgcgtactgcgcataccacaatgcatatttttttctcaatgacgcgtcaaacatacggtttaaaaagtccagattactgtagtacatcgcaaaatagccgagctcttcgaccctgctgcaaaatgcgttcaccagacttgaagccagctgccgggtgaccgttacgccctcgcccgccgcataattgacagatgcatattcaaaatcaaagcataccggatactgaacttcataattttcaactgcctgtatacaatactctgcttctctctttgccatctcttccgtatatgcgtaagaaaaccagtatacgccaaaaggaatgccaagtctgctgcattcctgcgcatttcttgtaaactcaggatctatattgccctgtccgtatccggcgcgtatcattacaaactgggtgcctgtactttttacatttgtccaatttatattaccctgaaactgacttacatcgattccatgaatactcatacttattacctctatactttttttattattttatgcttcattttgaatactgtgtcgaaacttaaaacgctatgctgtattatatagctggtgtgttgaggcatatccgcagtttttcaatgtaaagtcagcaacttgggggaacgaactatgagagaacgagaaatccaacgattggtccgcacactgggtataggtgcaacttaccggggataccggtatcttaatttcgggatcaagctatgtatgcaggacgaaaattatcttctgtccgtaagcaaactgctttatccgcagatagcaaaaaaataccaggctacaagcagcagtgttgaacgggatatccgtacggtcatcaatgtatgctgggaaagaggcaaccggcagctgctcgaggacatttctctgcgcccgctgaataccagaccgacttccagcgtatttctggatatactggtccattatctgagacaggactgtctggataatctataatacaaccgtttgactgtacttacctttcccctcgtaaacagactgagacagagccaacagccgtcactcagtctgtttgttatttctgtctctgtcttaatcgcttcttaagattcacttaaggaattttcgatttcttttagattattaacatactttagacatatttaccctatatactaagagtcagatagttgaacaacacacaactatctcccccctcataaagtaacgcatcagacatactggtgccgcactttactctcattcctttagataactataaaaataacgaaacccgttagccatctggttaacgggttttcgctgtcttcctgtctttaatcaccgatctcgtcttccctcatccgcaggccggccgtacttgtgacgggcagcgagaacacaatcgctttttccctgctgtcaagcccggtcttctccatgatcgccttcatgatctgatttttatcttttgttctcgtgacgataaaaatgatctccttctcggacgccagagataccccgagaaatttctcagcgctcttaattccggtgccttttgcgtgtattaccgtacccccgcctgcgtttgcgccgcgggcggcatccatgaccgaatcaatgcatccctgattcacgatcgtaacgagcagttcataatccgtttctctcaatatggtctcctcctctttttcatactcatgattctgaatcaaatattgaagtaccctcttccctccgatactgctgagcggaatcgtaaaggcaattcctgtgccgggtacgtcgatctgcatcttaatgatgagtccccgctttaattttttccacatctcttctgtcactacagaaaatgaaatcatcttctctgacgcttccagtccaaaataatccagaacggcactgtttgccgtcccccgccccagcgttccaaagacgaccatatgatcattttccttataaaattcctgaaatttatacttcatgctgcggtttgttatggcgaccatcatatatagcttactcatcatatcctcctctacagttcgataatatcgttgtcgtcaaaggcttccaaaggcagtaccggcaccgttccctctgaaacgccctgttctgcggatctcttctcctgtaattgatagatgaagcccagaatctgaatcgtgatcagcggggtcatggcgaccatggcaacgacgccaaacgcatctgtgacgatatttcctcccgccgcctcacacgcccccaccgcaaagggaagcagaaatgtggcggtcatcggcccggacgcaaccccgcccgagtcgaacgcgatcgcggtaaaaatctttggtacaaaaaatgacagtaagaccgccgctgtatatccggggatcagaaaccagaggatggatatgcccgtcagcacccggaccatggcaagtcccagcgataccgcaacgcctatggaaaggctgtaccccatggctctgcctgatatggcccccgatgtcagttcttccacctgttccgtcaggacatagaccgccggctccgcttttacgataaaataaccgatcaccatgccaatgggaatgatgatccagcggtaatgaagccccgctatgatctggccgaggtaattgcccgccggcataaatcctatgttaacccctgtgaggaataagaacagtccgatatatgtaaatacaatgcctatcgatatcttcaccagcgttttcttcttaagatgaagggaaatgacctgaaagaatacaaaaaacagtacgacaggaagcagggagaccagcatttctttcatataatgaggaagccccgatgaaaacaggcgccacatctctaccgaattctcagcatccggtatgacagtctgcgtataggaattccccgtcggcttatatatcatcccgagaacgagaactgccaggatcggtccgaccgaacagagcgcgacaaggccaaagctgtcattctccgcgtgcttatcacttcgcaccgccgaaaaaccaataccgagcgccatgataaacggaactgtcatcggtccggtcgttactccgcctgagtcaaatgcaacggccagaaaatcttccggcacaaaatatgccagtataaataccgccggatacaatgcgataagcatataagacagcggaattccaaacaacatcctaagcactgccgccacgagaaaaattccgacgcctgctgccactgccacgataagtgtatagtttggaacagacggcacctgctccgccagcacctgcagatccggttcggataccgtgatgataacgccaaggacaaagcagagcaggacgataacggcgatgttcttcgtccgcgtcatcctcgtgccaatacgctctcccatgggcgtcatcgccatttctgccccgagggtaaaaaacatcatacccactatgagaagcacggcgccaataataaaagccatcaggatgctggtctgaatcggcgcgatcgtaaagcacagaaagagaacgattccaataatcggtaagacagctcctaatgactcttgtaatttttctaataatttcgtttggtgtattctcaatacgcactcttgcctttcttgtttgttttgtgtatgttattataacataaatttacattttggaaaagtaaagagatttttaagaaccgcttaagaaattttctgcttctttaagagatataacatactttggacataattatcttttatactaagagtcagatagttgaacaacacacaactatctcccccctcataaagtaacgcgccagactttctggagccgcactttactctcattcctttagataactataacaacaacgaaacccgcaggccttatggccggcgggttttcgctgttactgccacctgcttatctttcacttttccaactgatattctctccgtcgcttaccgcggtgatcgttccaagcttatctgtcctgtatatctgtacatccgcgtcctcaagcctgcttatcacttccgcatggggatgcccgtaccggttattctccccgcagcttatgaccgcccacacagggtctgtattttccagaaattcttccgaggtggccgtggcgcttccatggtgtccgcatttaagtacatcacactccaggccgctgccaaaggtctctgtcatagccttctcggaaggcgcttctgcatctgcgcacattacaaacgattttttcccgtgtgtcagtttaatgcctgcggaagacacattcagatcattgtcctttatctcactcgggcacagtatctcaaaagacgcatcgccaagcttataagccgcccctacttccgggtctatgaccggaatatccatggtaacgatatcgtgctctacgtctgcatatgtctttgtatcatttgatacatccggcatgatgatctgttccacctcgacattttccattacgtcgtccgctccgccgatatggtccgcgtcaggatgtgtcaaaataaaatagtccagcttttcaatccccagttcttccagataagagactaccttaccgccttgtccgttattgcccgcgtcgatcaccatattgtggccggacgcctgaacgatcgtacagtctccctgtcccacatccagaaatgtgacccgcatctcacctgatacatcctgcgcatcctccccggaatcagcagcgcccccgtcttgttcctgcacacactcctgcacatactcctttaactggcatcctgacagcagcagcgccagacagaggaggatcacactgttcctcaaattctttactctttttccccttttatatgtacccatgattcgtccccttttttgactgatatctcacagattatcacagacacacatttttttcaactttgtacaaatatcagtcttttaaaactatacctacttgtgctataataggaatgcagcagtggccgagtggtcgaaggcgtcagtttcgaaagctgaagagccgaaaggctccgggggttcaaatcccttctgctgcgttttttattggtcattttcctttatttccctccagttttacaattctgctttcatgatccttgatctgcctgtcctgctcctcatttttatcccacagtcttttatgtgactcatggttctttacatcgagagcattcatatctttttcataaacagccatcttttcagaaatagtttttatcgtcatcgtcagctccgtcatcgctttcgtattctccttctggttcttggatatcggattatagatgctcaggaccatattgagcaaaactacaatgacaagcacaacgtcccattctttcacattatgatacctccttttctgtgtacatcatctatctgatcccggcatgccggcattttctttccgcgcattgcggcacatttaccaaatatctctgtattctttttttcacattttcgtccgagtaggcaatgcttcttctcggaaacatctgattcatctcatccgcgacttttatgtaagaataatcttctatataatatagcctgaacataatgcgcatctcgctcttttcaattgtctctataaatctttccacttctatcgtcatatcaagaaattctatttcccgggattccagcatcattaccagttccatcattttttcctgcttcttgtgaaacagagacggcgggttttttatttcatgcttcagccggcttatcccgcggcgcaggtttttgatctctgctttcattgccgcatactcattaagaagactgttgtccaatattcctcatccccttactctttatatattcgtcaaccgtataactttcatatgccttatggacaaactgcctggccgcggctgcgtccggcctgtgttccgcaagcgctctcagccggtcctgccggtccattctgcatacggtcctcgttcttctctgtctgctcaaattatcatctccttttttatctgccgcctggctggcggcggctttattgcgtagatctcatgttcagaagttcattttttatttttaaaatctttatatatacttcattcaggcatcacaattctgtcacatttccgttctatattaataatcaaacaagcgggagcgctttttatatagattttcttttcataacttttccttctgccagggcacttcgctctggcttttttatgcaaatttttaaaatgtgctaaaaacggataacattcaatattaagttgtcaaggttctatctcaggcggaaatgaataccgctgaatataaattctgcctttttgttcgtgcacgttttgtgctcacttataaagtacacgtttcgtgctcatttgtcaagcacattttgtgaacttcatctttacttttaagcacactttgtgtataatacagataaatcatgaaaggaagtgggccgatggctgattttgcaaatgtacttcgtctgttaagaaatggaagagggctctcccagcaggaacttgctctctcactcgggatatccaaaagcgctgtcaatatgtatgagcggggagaacgccagcctaattttgaaactctggaattgatcgctgatttttttaaggtagataccgattacctgctcggcaggacgaacgcggcgcgcaccgcttatcccggcacggttgccgcacattttgatacagaggatctgacagacgatgaaaaaaaagacgtggaaaattatatcgaatttatcagggcaaaaaggaacagaacataaagaaagtcctgtttatgatacaacaggccgcctatactggtaacaggagttgatagaatgaacagatacgaagaattgttaggcgaagcggcagccgaaggtatatcgatcgatgagaattacactttcagcggaaagacttcgggcttatatgtagataacaatattgcactttcatccagtctgaagacaacagatgaaaaagcgtgtgtgctcgcggaagagctcggacatcaccacacgaccgtgggcaacatcgtggaccttacgtcctccggcaaccggaagcaggagcgccaggccagagtatgggcctacaacaagcagataggcttaaaagggctgatctccgcctatgaacacaattgcagcaaccgccatgacaccgcagaatttctggaagtcacggaagaattcctgcaggaagcacttgattattactgcggcagatatgggacaggcactatagcggacggctattatatcatgttcatcccaagcctgatgatcggaaagatcgatttcacattgtgatggaccggttgcggctttaacaaatataagaatttaagaatcgcttaagaaactttcgctttcttttatattttaaacatattttggtcacatttttattttatactagattcagatagttgaacaacacacaactatctcccccctcataaagtaaacgcaccgggaaatttttattccccggtgtcgcactttactctcattcctttaaataactataacaacaacgaaacccgttggccggccggctgacgggtttcgccgttgtattctacagttcctcgcaccgctccgtcggatatatgaccccttctttcattacaaaagcacagtcgagcagcgcatacggatcagtcatcagatcacgtttccatgcggcaatatctgcatattttcccggctccagtgtaccgatcttatcttccagctgcaggatctcggaatttactttcgtggccgcatgcagcgtacggaatgtgcccatcttgctttccatccacgccttgaactcaaatccgctttcatagttctgatgggtcgcgaccatatcggttccatatccaagcttacatttacaattcttaataacctcccggcctgcctgaagcgcatctttataatattccagttttatcctgtattcttcctgttttgtctgtatcaataccggatcatagtgcactgcctcttcatacggacagaatgttggcactacatagatatcgttatctgtaatgagctgcgctgtctcttcatccatcagtgagcagtgctccataccgtcaataccgaattgtatcagcttcttcatatgttccacgctgtagacgtgcgcggtcaccgttttgccccattcatgcgcggtgtttatgactgcctggagttcttcatcgttcatctgaagctgggacggattatcgtaaggagtgaaaaaaccgccggtagccattattttaataaagtctgcgccatatttgatctcttcgcgcaccgcatttacaaagaaatctttccctgccccaagtgtaggccgcagatcctgcaggatcatagacagttccgggtttttggcaaatccctgtgacagatcgccgtggcttccggcgccgcagagaaatctcggcgccgccacaatacgggaaccggttatgtaacctttttcgatcgcccttttgacgtccagcaccccgaacccgttggaagtaatgcctcctgtatgacggatcgtcgtaaatccgcgggacaatgtcttcctggcagtgcgggcgacggccagcgtcttagcctcctcggaagttgtgtatacttcttcccgtatcgtatgccagtctatataatccatatgcatatgcgcatctatcataccgggcgtcaccgttgcgtcggacagatcaatgacttctgcagactccggctgtacgatatccggtcctacctcctcgatcttatcatttttgatcaggatcctatatccttctttgaactcttccgcaagtccgtcatacaacttaccgcagataatatgcgttaatttatccatatccttctcctttccttttatgagaccttatgcttcttcctctttcttattttttccgttcttataatcaactacatagatcacaacagacaatgcaatagcaatgagcatgtaatacgcgctgttcactgccgtaaaatagcagaagaacagacagacggccagcggcgccaggaagtacagaaactgcttcttccccttcaggaccgtctgtgccacaagtccgccaaacagcgccggcacaacatagtcgaatgccggctggatcacaggggaactgagcacgggcgcaagcggcgcggctatgaccactccgagcgctacgatgaccaccgtcgtgatgatggacgccccgcaggctataacggccattgtatggcactcatctgtattcggcttaatgccgagtgaatttatcgttccgatcgtagccggcatccttaggttcgtgacattccccgtgatgtatgacatatagagcgctccgggccccatgacagacatatagccaatggtctccgcaggccagtagggcgccataaaaagtatcactgctataaatccgggccaaagcagcttgaaatcaggccataatccatacaccgcactgaccactatgggaaatgctgtcatggccgcgaataaaaccagactggacgcgatcccaaatctatgtacccaactgtgatatccagatttctgcttcatgaacaaacacttcctttctaaaatataaagcaggccgctgccatggcgacgagcatacttattgtcatcaggtaatctgacagccactttgccttcggtctcttattatgtatatagacgagcagggcacctgccgcaaagctgatacagaaaacgacccctttcgttgacattgcgctgaatccatacgatacggatacataagccataactccggcgaggcacccgctgcctatggaaagtacaagcttcatgtcaaccttctcagctttttcatagatcatagatattggcttgatcgcaagcgatgaccagagcacacaggcgcttcctccgatcgtcattacccaggccgccgctacccagccgtccacactgtaaccgttcagctgaagtgtctcccccacgcattcaagagccgtcgatgccgcataagtctcataataggcagagccgatgatagacagacgcagccacggcagcggggtgccgagcagcggcatcagagacagcagtacaagcagtacaggcagcgtcggcatgatactgatcgaaatacctgtcgtcagccctttctttatctgggcaggctgaagtcccagttccagcgcatgcttccacgcctttttcataaatataaggcactgaagtatgacagcgagcagcagaatgcctacccataagaacatccatactgcgttacaaatctccgtgtaaaccatattcctacctccaatcactcataagaaaacaatttttagaaaccgcggtctgttatagttattataataacaatatatattcgtaattgtcaacattattatctaatatatgaattatattatatttatttttctgattatagtttctgttgcacgaatattcacagtctattaactcgttatttctatccagatttgtcccttaattaacagactatagtttgtttcaaagtgcggcagtagcggaaaaccgcatgattgatgggttttaggcaaatgtaccagtttatatattggccgattttccgcccaaatgccacccacatttactaacgaattataaaggtttgtaggaactaataacagtttttaactatgccgctcttaaattgacttttacaaggcgcagctatagaatgtaaatatatacacctttggcgaaaaaggcgtactcgacaaattctgatttatatggggtgatggttatgaaaaacaagaaaaatggaagatggaacgctgatgataagttaggcgcaggattagcattgggactggtgtttggtcttttgttcgataatttggcgcttggtttggtatttgggctaatttttggctctttgccaaattctaaaaatggaaggtagggcagagtggtacacactcaacaggctaaagcccataataaaaaaaccggtatagctttcactacaccggtctcataaattcaatatataggtcaaaattccgcgttccgtaataaccgagtgagaaaccaccgttctgcacacaccagtccatgataatgccccgctcaaggagcagcacgtgatgcgcaagttcctccaccggcatatcatcccttatctctccctttttttgcccttctgctatgatcctgcgcacgagccggttataataacggtccggattgagaaagcagtcctgtttctttttcatgagctgggactggtacagagcggccagaagttccgccgacacgttcccttcgataaagtacgaaacatactggctcagctgcttcagctggacgagactgtccaggcctttgtccatattgtcataaaatttctcatattccctgtcaaagaacgaatacagagagtttaaaagctcatcttttgctttaaaataataataaaagccgccctttgaagtatttgcctttttgatgatgtcatttacggtagtctcctcatatcccttttcataaaacagttcccatgcggcgtcttttatttcttccttcaggcctgtcttctctctctctctgttcattgatgctacctccgcaattctgtttccattaaggcatattagtcttaatgagtattataacagactttcggaaatttttcagcagttccatttgagagacagaggcttctttctttttttattaacctgtggtagaatgtatttaattgttgtgacaatacaaaggaggctgttttatggattctcttgactatcagatacttgaaaaattgaagagcaatgcaagacagcgcgcctcggagataagccgcgaagtccacctttctgtctccacggtcattgaccgtatccgcaagatggaggctgccggcattatcaaatcctatacgatcatcacagatgacgccaaagtcggcaatgacgtgactgtactcatcgaagtgagcatggaacacccgcagttcaatgaggactttattgaaaatgtgactgccaatccgtatgtgatcgcatgctattatctaaccggtgaatttgactttcttctgaaagtgacttgtaagtcgtctgaacatcttgaggaaatacacaagtgggtgaagggccgttcaggcgtacgtcagacgaggacccactatgtgctcagcacgataaagaatatacattcctcccttcccgcagcagaggaggaagtctgagagcaggagttatcctgcttttctctctatctcttcttctgcctgcagggctgccctgttgagtgcatctaaaatttctttctccacctccagcggaaaaccgtccacactcagagcctgccgctttgtgacaccgtctacactccccatctttacgatcgcttcaagatacttttttatctctttaaatttcggaagcagccttattttttttatctgctgcatataagccgccagcgcgtaagctccccagttcgacaccgtggatatgacaagagtgtctacctccacctcgcacggaacgagtgacagcttcgcgcgtatcacctcttttagattgcccatccctatctcgtttcccccatcaccgattccaaatgtggggatgttcatctctgcggctttctcaaacatcagatctactctggctgtccttgatttaatgcttgttccccgcatgtttgcatagtctttctcctcgtttcgcccgcaccgttcaatggaaatgagggctgccggtctgtatgtttccagcagattctcataagcgtttcggccatcgtcaatgttcatatatttgacttccagattttccatctcaaaaaaacctctgcagtatttatctgtgacgatgacgggatgataaccaagtttcctgagcgctacggccagcgccattgtcccgggcggtccgtctgtctccgcatgtccgtctacataaaagccggttgtcagcaggatcgttcctttttccagtgaaagcagttttaaggccgcttttctgcagaactttgcatccatgtatgtgcggaggatatgcatgcctctgcaggaataacgcagcaccacatcctccactgtctctgtccttctttttgccgtactgtccatcgcctctcactcctaaccgtccagctttccaaatggaacaacctgaatattttcaatttccagtgcttctcttatctttacaacaaaagcaagcgccttcggtccgtctccgtgtacgcacacagaatctgccgtcacctcaatatctctgcctgtcacagccgtcactcttttgtccttcaccatccgtatgactcttgtgatcgcctcgtcctcatcggtgatcattgctcccggcctgcttcttggcacaagggagccgtcttcttcatatgcccggtccgcaaatacctctctggcacacgttagtccgaatgcttccgcagcattcagcagctcgcttcctgcaggtccgagcaggatgagccccggatccacttcaaagatcccctcgcagactgcctcggccagcgcctgatcccggcacgccatattgtacattgccccgtggggctttacgtggcaaagcctcaccttctgggcggtgcagaaagcatgcagcgctccgacctgatactgtaccatcgcctttacttcctccggggaagcgtccagattccgccttccgaaaccggccagatccgggtaccccggatgtgcacctatgcacacaccgctttcttttgccagagccactgtctttgccatcaccaccggatccgacgcgtgaaatccgcacgctacgttggcagatgatatataagggatcacctcttcatccatgccgcatttataattgccaaagctttctcccaggtcacagtttaaatctacggtatacatcagacatcctccttgcttaatatttgagttctgcatttttaacatctgtgataaacatgtgtcccggcgaatgggtgatgacgatctccggttttacattcatcacaacattctggggtgtcaccccgcacggccagaaaaccggaacttctccttcgcgcaccgtgacactgtcaccaaagtccggccttgtgatatctgtgatgccgatggcctccggggccccgatatgtatgggagccccgtgcaccctgggcatctgcccggtcacgagcactgcctccgccacctgttccctgggaagagggcgcatgctcactaccatacttccacagaatataccggcgggcgtgcacgctatatttgtcttatacatgggcacattgcagttttcttctatatttcttaccggtacgccagcgtccagcagcgccgactcgaaagaaaagctgcacccgataagaaagcttacaaaatcatctctccagaattttttcacatctgtaaactccccggcaagttccccttttttatagatccgatacctcggaaaatctgtcgcgatatcggcgtcctgcgcaagataacgcagctgtctgcttcctgtgtcgctcacttccagcaccgggcacgactttggatttctctgcgtaaacagaagaaaatcataggccagctctctgggcagtatgacgagattcgcctgggcgtatcccgcgcacattcccgaggtagggccggtgatctggccgctgcgcactaattctctcgccttctgcgggctcatgtcgtaatagtccgtcatcttctcacctgctttctgttgatccgctctgcctctgctcctgatatggcggtaaactttactttatctcccggttttccctgagcgatcttcggaatgtcaaaggaacatacggtggcgatcttggcgtatccgccagttgtctgtcggtctgccagcagaacgatcggccgtccgtccgcgggaacctgaacggaaccaagggctatggcatccgagacgatatctgtaccgttcctgctttcgatcacaggaccgtcaagccggcagcccatgcggtcgctctgttccgatatggtatatacgccgctgtaaaatgtcttctttccttcttccgtaaaataatcgtcctgcggtccggcgatgactcttacatttatttcagaaggatattcctgtgctttaatctttcttccttttacttcctcatagcttttgcctgttccgagaggaagctcatctcccgccttcagcgctctcccttcatatccgccgagccgacatttgacatttgtagagcggctgcccatcactgccggaacgtcaatgcctccggcaaacgcaatgtacgtacggcagcccgtttttaccattccaagcgagagagaatcggacgcttttatttgtatgggagtgttcatggaaatggggcttccgttgagctttggccccatgtccgcccctgtcacggccacgaccgtatcctctgtaaattccatcacgccgccgaacagggccgcctccagcacagcctcgtttgcctcatttcccacaagatatccggcgtccgcgtatgctttttcatccatgacgccggacggaccgatcccaaagcactggtatccgtatcttcctgcatcctgtactgttgtaaatgctccaggtatcactattcttactggcatatgttcccctcctcaacttccggctcatactcacctttggacaccatccggcggatgtcataatagtcattgatcgttatcgggacaaaacggatatattcaccggctttgcagagaaccggctcctttctgccgggatcgtagaattccaccggcgtcccgcccagcagacgccatcctccgggggaagccacgggatatacaccggtctggctgcctccgatccccactgctccggggaggatctttactctcggtgtcttaagtctcggcatttcgatccgcttgtcaagcccgccgaggtagacaaagcctggcaggaatcccatcatatagatcttgtagtccaccgaactgtgaatggcgatgatctcatcccggtcaagtcctgtgtacgcttccatatccgccaggtcacatccgaatctcgccccatagcagcacgggattttccatattctttttttaatggtgccgccttcctgcgaaatgtccccgtaagagagtatgttctgtctgactgcctgaaaggaggtctttagcggatcataatatatggtcagcgaccggaaggcaggaacaagttctttgataccaggcacattttctttcctaagctttgcggcaagcgcatggacctggtcattgatctttgggtcaactgtgcttccgaactcaacggtcaaggcgcggtctcctgcgcgcaaaaattttacttctctcaaaacatcaccttccccatttatttttctctctgttacgccggtgttgcgtcatagaattcctgcagcagggcagctctgattttttccagcagttccggatttctgccgcctgccgctttcccgtcgatctcatctgcgtgaaggcagaggttgctggaactcgtcacgatgatctcctcggcattgtacaggtcatccagtgaatatggcgcctcgtttaccggtatgccaagctgtctgcatattttgatcaggtgggctcttgcaatgcccggaagtatgagattatctgtcggcgcggtcacgaggatgccgtctctgattatgtggacattactgtgggcacactcggtgacgcgccctcccggacggtaaaacacggtctcctggcagcccgcctcttttgccttctgcgcggccatgacggatgggatgagattcagcgtcttaatgttgcagtggagatatctcgtatcttccattgtcacgagacgtatcggttcctttccgtcagatatctccgccggcttcagcatgatccacaagttgcccgggccttctgtaaatacgtggtcgcggatcccggtccctctcgtcacctgataatagacgaacagatcgcctgtatccattttgtctaccatctcctgcagcagttccttcagttccttctttgtcaccggcatctgaatcttcagaagtcccgcactgttaaaaaatctgtcgatatgctcatcaagcgcaaatattttatagtttctggaaggtcccgcatcgtacactccgtctccgaaccatgacacgcggtcgttcattggaacggtcatctcatcgagttctccgaatctgccattgtagtagcctaatgttttcattttctttccctccgttttccgggcctggccctgtccataaaaaaatgcataaaaaaagtacacaaacaaagtttctgacacctttgtctgtgtacctgctcattaaattttgttttattctattctcttaataaatcaatgtcaataaatctcgtctgattccgaattatttttcgttcccgcctttttctttcgcaattttttcggaaatccagcggtaaatatcctcatatacttgttcccggtccgtctcattcaggatctcatgcctgtccccgtcgtaaagcttcatggacacgtcccggataccggcctctctgagctgtccgtataccttttttactccctttccgaaatctccgaccgggtcatctgcgcctgagacgagcagaagcggaaggtccttattgatcttttccgtatttgccttcttggtcagcactttcataccggcaaacatttggtagtatgcgctgacggtaaacacaaaactgcagagggggtcgcttacatacgccgcacacttttccttgtcggaggtgatccagtctttcggcgtgtctcccggctcaaatcttttgttatagcttccgaagcttaagttgttgaccaggacgctgcggtgcttccagcctttgaagagcgcgatgatcctgcacaatatccggcccatggccagcagggcactcccctgacagccggtacccataatgaccgcgcacgcaagtccccggctgtatgttgtcagatactgccggagcagaaaagaacccatgctgtgtccaagcatgatatacggcacatccggatatttttcctgcgtcagttcccgcagcctgtggatgtcagcgataacatatttattcccgtttgtctcatcaaaatacccgaggctttcctcatcggcagccgatttaccgtggccgagatggtcatgtcccgtcacgtagattccgcgttctgtaaggaaagcggcaaattcatcgtaacgctcgatatattccaccattccgtggcatatctggacgactgcttttatctcctgccccggcacccactctgcggcgtgtatattgctccggccgtcgcttgacggatagtagaaatcatttttcattgatacctctcctgtctctaaattggctgtgctgtccgcgggcctcacatacgtatggaattttatgatggaaaagaccgctgtatcagcggtcatccattttaatataatcccggtggggcgccagcggcttgtatgccggccggataatcttgtctacgttcttaagctcttccagtctgtgcgcgctccatcctacgatacgtgcggctgcgaatatcggcgtgtaaagtgacggcggcagatcgagcatgctgtacacgagtccgctgtagaagtctacgttggcattgacgcctttgtatattctgcgcttttctccgataacatccggagccatatgttctaccatctcatagagggcatattcttcctcaaagcctttttccttcgccagctgctttacaaatttcttaaagatgtcagctcttgggtcggacacggaatagatcgcatgtcccataccatagatcaatcctttctggtcaaacgctttcttgtccagcagatcgcacaggtactgtcttacggcatcctcatccttccagtcggtaagtttctgcttcatgtcctcaaacatctgtgtcacctttatgttggctccgccgtgctttggtcctttcagggaagccatcgccgctacgatcgtggaatatgtatccgtaccggatgatgtgacaacatgggtcgtgaatgttgaattgttaccgccgccgtggtccatatggagcacaagcgccatgtccagtatcttggcctccagcttcgtatacttccggtcttctctgagcatcataagtatattttcagcagtggacagctccggtgacggagcatagataaacaagtcttctccgagacggtagttgtatgcatgatagccgtacaccatcagcatcgggaactggctgatcaggttcaggcattggcgcagaacgttcggtatggtcgtgtcatctgcctttgcgtcataggaatacagactcagaatagacctggacagactgttcatcatatccctgctcggagccttcatgatcacatctctcacaaaattaggcggaagtgtccttctctccacaagtgtctcgtgatatgccgccagctgcttctctgtcggaagctctccaaaaagcaacagataggaaatttcttcaaatccataatgtttcgcttccaggaaccctttgactaattctttgatattgtaccctctgtaatacagatttcctgcgcacggaacttcttctccgttgacgatttttttggcgcagacgtcggatatatttgtcagtccggcaagtacacctttaccatttacatcgcggagaccccgttttacctcatatttggtatacagttctttttcaatggcattattgtcctcacataattgtgccagctgctggatctccggcgtgatctcaaataatgcatgttccacatttttagtcatagtcatcatcctttctgtccttattcatattgtcaatccgccagcggcggacgaaatatccattcataacatcagcggttcagggcgtatatataattgctcagctttgcaaactcctcaagcgtcagggactcgcccctgacacccgggcctttcccgagccgttctatcgcttcgatgagctcttctttcgcaagagacagcttatcagaattgttcagtccgtttgcaagcgttttgcgcctctgattaaaggatgctcttatgatatcaaacatcagcttctcgtcttttacctcgaccgggggcttctcatggcgtgtgagccggataacggcagagcccaccctgggccttggcataaaacagttgggcggcacatttgcaacgatatacggttctgcataatactggaccgccagcgacagcgccccgtagtctttattgcccggtccggtctgcatcctgtctgcgacttctttctgcaccatgaccgtgatactttccaccgggacatcattttcaaataatcccataataatgggcgttgttatataatatgggagattggccacaactttgagcggcctgccgccgttttcctcccgggccagttctcttacgtccagcttcagcacgtcctcattgatcaccgtaacattgtcataatcgtgcagggtgtccgtaaggatcgggataaggttcttgtcgatctccacggccacaaccttgccggctgcctccgcaagatactgcgtcatcgttccgattccggggccgatctctaataccatatcctctttcgtgatgtctgctgcccggataattttatccagaacgtgagtatcaattaagaagttctgtccgaacttcttttgaaatgagaaatcatatttctgcagtatctctatggtattttgcgggtttcccagcgtcggttttctcatatatcacttaactcctgaataatgtgctattccttattatacaacaaaattgtccgaaattccatacaattctgacgcattgctttccgtctgctttactaccgtgtcataatccacatttttaatgcgtgcgatctcctctgctacatagcggatatacaacgaattattccgctttccacggttgggctccggcgcaagatacggacagtctgtctccagaacgatagaagtaagcggtgtatcctccacaacttccctgagcttttttgcgttcttgaatgtgacaactccgccgacaccgatgctaaagcccatctttacatactcccgggccagttctctcgaatacgaaaaacagtgtatgatccccttaagcccctgcgcatgttccttcataatttccagcgtatccgccgccgcgtctctgctgtggatgactacaggcagatcatgccggcgcgcaagctcaagctgccggataaaccagagcttctgcaagtcatgggattcgttgtcccagtagtaatcaaggccgatctcgcccacagctactacctttctgtccgcaagcagcgtttcaatctccttaaaaaaatcctcattcaaatcaccgacatggtccggatgaatgcccacagcggcatacataaacggatatttccgggccagatcaacaaccgcccggcaggatcgcggcgaggcgctgatattcacaatagtgcccacgccgcccgcctgcatggatcccagcagctcctcccggtcctcgtcaaactgatcgtcgtcataatgcgcatgcgtatcaaaaatcataataccctccaatataaacggggacggtaatgaagttggggacgggggttttttaaatttcccccgtcccgaactgattttaacgtgtcccttttttattttaatgtgtcccttacaagagttctgcccttaactgctccggcgtcttcatggataataatgccggtgggatatcgaatactgtttttgcaccgctttctccattttttgaaagacggtaagccgctcttgcgtagcatacgagcacgctggccgtaaactccgggtttgaatccagcttgagcgaatactcgataatgtgccggcttccttctgttccggtctctccgctgcggatgacgaacccaccgtgaggcatgctgctgtgattttgctttaattccgcctctgtgataaaggtaacggttgtatcataatcatcaaaataattcggcattgccttgatcgttcgctcgatctcctgaagatctgcgccttcctccggcacgacatagcagtcacgcagatgtttttctctcgttgtaagttccggagcctctccgcttcttactctttccacagctttatccacaggtacggtgtattgaattgcgttcttcacaccttctatgcgtcggatcgcgtcggaatgtccctggcttacgccttttccccaaaaggtgtatgtacttccctgcgcgagaatagactccgcgtacaaccggttaagtgaaaacattcccggatcccagccgacagagataatacccacatttccaccatcttttgccgccttatccacattttcaaaatattccggaattctggcatgcgtatcaaaactgtcaatcgtgttaaagtttttcacaatttccggtcccataactggcaggtctgtggcagaacccccgcagaggacgataacatcgatctcatccttcatggaagccaggtcatccatatgcttcacctctgccgattctgtcgagatctttacgtctgccgggtttcttctcgtaaatacagccttaagctccatgtcttcattacgggccaccgcaagttcaacaccttttcctatgtttccgtagccaacaataccaattctgattttatccataattcaatctcctctcagttggggacggaggttttctcgatttcctccgtcccttttttaaccggggacgggggaaattgaaaaatcccccgtccccaattcattttcacgtgtccctctagcagatttcagcgccggcgggcatttctttttccggtgtcatgagtgccagatttccttctgcatcttctgcgcacagcagcataccttctgacagtacgccggcaagcttggccggtttcaggttgacgagcaccataaccttcttacctaccatttcctctggcttgtagtatgcctttatgcctgacacgatctgttttatctcgcttcccactcttactttggagcagaggagcttctttgacttcggcacttcttcgcattcgagtatctctcctacctggaactgcatctttccaaaatcgtcgaatgtgatctccggcttagctttgatgtcaatgacattctccggcacttcttcctccgcagggtgcagtgcctctactttttcaagcacctcttcaaggtcaagtcttgcgaaaagaatctccggcttttcggtcactttaccgtcaccgagctgtccgagtatttttccggatgtctccggcataaacggttccagcagcactgcgcctgctttgatgctctcctgcaggttatacagcaccgtctcaagtctgtcttttttctcctcgtccttggcaagtgcccacggcattgtctcatctatatacttgttgcagcgcttaaacagattgaatatttctgtgatggcatcggcaacccgcagttcatccatcttgccctccactgccttcggcgcgctctctgtcatagctttcaggtcagcgtctgcttcgcctgccacccctttgtcagtgaccgtgccgccaaagtatttgtttgtcatggatatggtacggttcaccagattgccgagtgtattggcaaggtctgagttcatgcgctctaccatcagctcccaggagataactccgtcattttcaaaaggcatctcgtgcaggacaaaatatcgaaccgcgtcgacaccgaagaaatcaacgagttcatccgcatacaacacatttcccttggatttgctcattttcccgtctccctgcagcagccacggatgtccgaagatctgttttggaagaggcagatccagcgccatcaggaagatcggccagtatatcgtgtgaaaacggataatgtcctttccgataaggtgcagatccgccggccagtcttttctgaactgctctgtgttatctccgccgcagtcatatccgattccggtaatgtagttcgtcagcgcgtccagccatacatacacgacatgttccgggtcaaagtccaccgggatcccccacttaaatgaagtcctggacacacacaggtcctgaaggcccggcagaaggaaattgttcatcatttcgtttttacgggataccggctggataaactcaggatgcgagttgatatggtcgatcagacggtctgcatatttgctcattttaaagaaatatgcctcctctttcgccggctgcacttcccgtccgcagtcagggcatttcccgtccacaagctgtgattctgtaaaaaaggattcacacggcgtgcagtacatcccctcataatggcctttgtaaatgtccccctgatcgtacagctttttaaatatcttctgcacctgtttttcatggtaaccatccgtcgtacggatgaatttatcataagaagtgttcatcaaatcccagatacgcctgatttctccggcaacaccgtccacaaattccttcggcgtaacccctgcctcttctgccttaagctctattttctggccgtgctcatccgtaccggtctggaaaaatacatcgtacccccggcttctcttataccttgcgatcgcatctgcaagtacgatctcataagtgttcccgatatggggctttcctgatgtataggcaatggctgtcgtaatataatacttttgtttttccataactttacttgtcctcctgtcgttgaaataaaaaaatcttccctaatccgaaaatcagagaagacgagttatcccgtgttaccacttctattcatccctgcctcacggcagagacctcagcaagtgcctgctggcactctttccgcagtaaagggcggacccattgcagccttgcacaaaatgcgggccgtccgttacacgtcctcatacattttcatgttcggtgcaccactcagaagccatcttccgtcagtcttcatccatccctctcagcatccccgcgtgcagccccggtcttatccggctgcgttcacggttcaggatttctctgtataatgtcaaaagacgtactctcttcgtcattgcgttttacatatagctcatgatcttatttcaactttttcattaatatggtaaaaatcgtaacatacggatattcaattgtcaagccgggaacaccgcaaaacagccgctgttcttatgatctgcgtctgataattcagtgcttagaatattcatacccgggccttacggcgcatacttatagataaaacatccaaggagccttcatgcgtaaaaaaatatcgcttctcctgaccgtcacgctcctctttgcccttgccgctctggcgtcatgctccagagggagcaaaagtgcagatgcagaatttgaggcatacacagataacctgttctgtcaggaagtttcctccaacacgatctctcttcactatacactggaaaatccttccgattacggaattgacaaggcgccggtctccttcggcagctgctcgacggataccgccgccatcagcgcatcggcggaaaatgccctcgcatcacttcacgcccataaccgcgcccagctctcagataaaaacaaactgacctacgatatactggacaattacctgagcacctcacttgacgaagccgggtatgtactgtatgacgaaccgctggctccgcttacaggcacgcaggcacagcttccggtacttctgtccgaataccagtttaacagcgccggtgatatagatacttatctgacacttatgacaaagctgccggaatacttcgagtctatcattgctttcgagcaggccaaatctgaaaagggcctttttatggcctcctattccgccgacgacattattgatgaatgcaatgcgttcatcaaaatgggcgatgacaactacctgtactcttccttcacagagcgtcttgacgcgatggagcttgacaaagcagactatgacgattatgtgaaacgcaacagggaaaatatgaaggaatacatttatccttcttataaaaaactggccgattctcttaaggcgctgcgcacgacaggaaaaaataacaacggtctgtgttatcttccggacggacaggattactatgaacttgtcgtcaaacgggaaaccggctccagccgcaccgtcaacgaactgaaggaacttacccagtcacagatactggaagaccttaccgcgatgcagcaaatacttacctcctcttccaaggagacattttcaaatgcagcaccttcacttgaggacacggatcccacttccatcctgtcaaatctgaaatccaagcttaagggcagctttcccgacccgcccgacgtctccacggagatcaaatacgtgcagaaatcaatggaagaatacttaagtcccgccttcttcatggtgccggccatcgacagcactacgaacaacgttatctatatcaatcagggacatatgccggatgacctttcgctgtttacaacactggcacatgaaggatatcccggccatctttaccagaccgtatattttcagaacctgaaaccagatccgatccgcaatctgctgaacttcggcggctacacggagggctgggccacatacacggaaatgctcagttattattatgcccccctccccaaagaacaggcagcactcctgcagcgcaatacttccgttatattgggactctatgcacttgcagatatgggaatacactacgacggctggaaactggcagatactgtctcctttttccgtcagtacggtatcgaagatgccaataccgtagaaagcatatacgacctgatcatttctgacccggcaaactatctgaaatactacatcggctacgtagaatttatggagctgaaaaaggaagctatcgacaaatggggagattcttttacccaggaaaacttccacaagaaagtgcttaccgctggcccggctcctttcgatatactccgtacatatatgttccagtaatatatcccatgatcattttgcaaacgttccgggccagagtaagaccgccgcaagttcaacacttgcggcggctttttattgtcaggggacaccataaaatgaatcagggacaggggaaaaagagctggggacgggggaaatttaaatttcccccgtccccaactccctcctaccccatcattcctgccagtacgacgctggccacgaggccggcgaaggtggcgaacatggcgccggacagtgtatatctcgtctttgtcacttttgccgtcatatagtagacgctcatcgtatagaatatcgtctctgtacatgacatgctgatagaggctatgagtccgatataggaatctgttccgtattccttgaatgcatcgagcagcaggccggtggccgcggaggatgagaacatctttaccacggtgagaggaacgagctccccggggaaacctatgtattcagtagcctttccgatgatcccggacatgaagccgaggaacccggacgcccgcaggatcccaaccgccaccatgagaccgatcagtgtcggcatgatcttgatcactgtaaaaaacccacttttggctcccttaacgaatgtatcatagacatttaccttcatcagcactccataactcacaatgccgaagatcacaagggggacaatgaagtccgatatatacatgaataaccgcatagaccaattccttacatgaaatgcttatttataatatatgccgcttcctgcgtctttatggttaatttactccattgaaaggcaaataaaaagagaatatactagaaggatcgagagactaacgacaggacggtgatataatgaacagtaaaaatgatttcggacagggaagtgtagcgggaaatattatgaggcttgccattcccatgacactggcccagctcatcaatgtactgtacaatgtggtagaccgcgtctatatcggccatattccccacacctcaacagaagccctcaccgggatcgggcttacactgccggtcatcacgatcatcacagcgtttgccaacctgttcggcatgggaggggccccgctgttttccatggcgcgcggccgcggtgacagagagcgggccagaaaaatcatggcaaattcgctctccatgctgctcctctccggaatacttctcatggccctctgctatatatttaagcgccccctattgtaccttttcggcgccagcgatgtcaccttcccctacgcggactcttatctgaccgtttatctgtgcggcaccctcttcgtcatgacaagccttgggatgaacaacttcatcaacgcgcagggcttcggggtcaccggcatgctgaccgttaccatcggcgctgtgctgaacctgcttctcgaccctctgttcatctttgtcctccatatgggcgtacagggagcagccgcagccaccgtaatctcccagttcgtctctgcggtctgggtcttttgctttctcacaggccaaaaggccgtcatacgcattacaggaaaatatatgagaccggaggcggcacttgtaaaagaaatcacaggccttggactgtccggctttatcatggctgtcacaaacggctctgtgcagatcatgtgcaacgcagccttacagcgctacggaggtgacctgtacgtggggatcatgaccgtgatcaattccgtgcgggagatcgtcaccatgcccgtaaacggactgtcaagcggcgcccagccggtcatgagctacaattacggcgcagaaaaatatgacagggtgcgctcagccatccgcttttccaccctatgttccatcctgttttccaccaccgcatgggccctcatcttcttttttccacactttttcatccatctgttcagcagtgaatctgagctgataagggaaggcgtccctgcaatgcgcatctacttcttcggcatcttcatgatggcgctgcagttcgcgggtcagtctgtctttgtggcacttggcagatcaaagcaggccgtcttcttttccctgttcagaaaagccgtcatcgtcatccccctcacacttctgctgcccgctcttggcggactgggcaccgacggcgtgttcctggcggaaccagtctccaactttatcgggggaaccgcctgcttcgtgacaatgatgctgaccgtctggccggcgcttcgcaagtcccagacataatttgattccgtcaataaatgtgaaaggagtaaaaacatgtattgtacaatcacgagaaaaaacacaacaaggcagccacggcatcagctacaatctcacaaaccaaaacggtgttcagctcggatgggaatctatcctgggattcagtacggcgggaaaccagtttcatttcgccgctcccatatccgccaatccgattaggcggggtcctgaccttcctccctctacgggaacacagattgttacccgcggggtcagcggctgcagtgtgttcatcgtctcatacggcagtcaccatgtcatggcacatcttgatcttcccaatatcaaccaccagaacaaaccggtaatgaaggatacgctggcctccatcaccggtcaggtccctcttcctgcgcaaaacacaccgggacattatgtacatcctgatatatttatcagtatacataataaagcagactccacacgtgagcctgctctctttgccagaagactgatccgacattattatccttttattccaaaaacaaaaacgccacccgcaccgggccagtctcttctgaactatctgacaaacggtgtgcctgccggccaccatataagaattctggaccgcacctgcacagggcacgatggcgagccggacatgtttaaccatccggagatcggactatatttagaccccgcaaccgggctccaaatcttcggagacatacggggaatcgatatcatgggcaccaatgtgtctgtccacgactatccgttcctcataaatctgactgaccctcagacagatttcactgccctccagatactcggacagcaggcttctgaccaggcgcagcaggcaaacgctccggcccgggccgcccgttttctcacctgatcatcccatctggagaagcttttccttcagctcactttccagacgcatcatctcctgctccgcctcccggcgtttcaggcgtccgttctgctgtatctgcatcacctcatccagcgtggatataagtgattcattcgttatcttaagcgtctccatatccacgatgccgcgctcagattctttcgccgtctccacggtagccatcttaagcttctgcgcgttcttccggagcagttcgttcgtcatatcggtcacctcccgctgggcggcagccgcctgggcagaatgttccacgccgagcgcaagcaccatctggctcttccagagcggaaccgtgttcacgatagtagactggatcttttccaccatgagcgtatcgttgccctgtacgagacgtatctgcggcgctgtctgtatagagatggtcctcgtcagttccaggtcatgtatcttcttctcaaaccgattgcacatggaatccaggtcctttgccgcctgggcatcttccggcagcccgcttctctgcgccttatccatcagttccggaagtctgctctccctgacttcccgaagcttctttttcccggccagaatatacatggacagctctttaaagtaagtaagattcacctcatacatcttatccaggatcgcaacatccttcaaaagctgtacctgatggttttccagcaccttgcatatctggtttacattatcctccgccctggcatacttggccttcatcgccgttatcttgttggaagtcttcttgaaaatatttccgaaaaaccctttatcttcttcctcgtcaaagcttttcagctctttcacaacaccggacagcagctctcccacttcccccagatccttcgtctttacattctcaagagcattctccgaaaaatctgccatcttcttctgcgtgccgacgccgtactggaggatcacggacgaattggtcagatcgatctgttccgcaaaagcatccaccgcttttcgctcttcctccgtcaaaatactttcgtcaaatacctgggcttcctcctgccggaccgggacagctgtctgccgttcctcctgaaatggctccagcgtcaaagccggggtcgtctgaaactgttcaaattctttttccattgcgctcttcctccgtccggccgtgccggtcttagtcttctattctctcttaaaaatcgtccttcgtcagcccctcctgcgccagcatcgtcttcagcacagatatatcagatgacacatcccacgccgtatcctgaaacaggctgtccagcagcttttcaaacgcagcgttcagtgtgtccagcgtcttttcgatctcctgtttggaagacagaatattctctccctgcaccggctgggcatccagctcctcataagcctccagaagcttcaccgttgtcggaaggtaatattccatcagcctgcggatctcaggcacacagcccggattctgctccacccggtcaaatatccggtccaccagcgtctccatccgggatattttataagaaatctccgcccccgggatcgcatcattacactcgtggatcttctttatatactcatcgccggtgcggacgatctcccttatctgcgggtccatatgttcagccgtctcttccttttgtgccttccgctcctgctcctgacgcttcagttcctccgtgtgctccatgagttcctcatactggctatatgcacggtgcgtcaccatgaggcatgtccgctgtctgtcgagatgtccctgccggaaccagcccttccggatcattttctccagatctctggccacgtacttcggcggcttcttaacctgttctgccagcacttttatgtccccgtattctctgccctccatcccctttatgtaagcattgaaacgctttattttgccgaggatatggtgtccggccgccgccagcaccgcacttcccgccagcacgatcacacccgccccgaaaagcagctgaaataccatattaaaactgccgccagccagctctctgaacagcgaaagcgggagcccgaccagaagaacgccgccgagcgcataacccactgctgccataatgactgcgccggcctttgctccgcctgtccttacatagagcgcaggcacctgatccctgtgaacgtcatacgtgtcgctttccgggcggctgtactgtcccggatacggacggtcccggcgcgttctgccgtaccgggtctgccctctgcggcgcgccatatcctgcatgcttctgtccacggcatcccccgcgcttcgcacaccctttccgataccgtccaccgcctggtatatcgtatcgttgatcgtctgatttaatttatcaaaatttctggaatccaccgcatcctgaaccgtcctgcggatatcatccccgaatctttcccaatcccagtttgtcatcctgtcctcctggatctctcacataccataaacagccgtattaccgggctgtcccctcactgcacatatcatctaaagtataatggaaacagggcaaaattgcaatgctcacagaccatcgttctgctatccgttgccgccaagggcggcacctttcttcagctcacgtctcttctcagacgcatccacacatatcgtacatgccgcgtcgcctgtgatgttgacggtagtcctggccatatccaggatacggtctacgcccgcaacgagcgcaatgccctcaagcggaagccctacgctctgcagtaccattgcaagcatgatgacgccggaacccggaacgcccgccgttccgatcgatgccagcgtagcagtcaggataatggtgatctgctgggagagcgtgagattcatgccaaagatctgagagataaagatgacacttactccctggtaaatcgcggttccgtccatattgatcgtggcgccgagcggaagtacgaagctcgatatctcttttcttgcccccagcttctgtgtgcactccatgttaaacggcagcgtccccacactgctcgcgctggaaaacgcaaagatcatggcctcgcccatccccttaaagaacgtgagcggattcatccgggccatggccttcacaaggctggaatagacgagcaccatatggacaagacatacgagatagacaacaccgatcaatttcatcagcggcagcaggatagacatgccgttcgtggcaattaccggagtgatcagcccgaatacgccgataggcgaaagtttgatgataacgcccatcactttgatgcatacctcagagaagctctccacaactgctccggccatcttccccttttccccggccagtataatgccgaagccgaaaaacagcgcgatcacgataatctgcagcatcgtggcctccgccagaggctgaatggcattggatgggaaaatgttcacgatcgtgtcgataaaagacggcgtctccgacacgccttcaaacgcctccagcgattccgaggaaagcgtatatccgctcccaacattgagcacattggcgatcacaagcccgagcgttaccgcaaatgcggtcgtgcacatatagaacaggacagtcttgcctccgatggatcccaccttcctgatgtcctgaagggatataacaccctgcatgatcgaaaacagcacgacaggaactactaccatcttaacaagattcaaaaatatcgtaccgagcggtttaatatacgtctcggcaatatcactgtttttctgaagcagcaggcctgctgcgatccccagtataagcgcggccagtatccatacggtcagcgagacctttttcttttctttttgtgtattcaaaacgtttcctccctcttattccatgaattggtctattgtaaacaagttatattttctagatatccttatatcctccctggtgagcagcagtgaagcgatcagcccatcatcttcctttagtattgccgctgacagcatgaccttaatcgccaccggcatcattgttttgtaggacagccctgtcagcatgcctgtcctcctgctcgtacggttcagactgttgatacagcatatccacgcctgctccgtaggattgttctgattctgcaggttataattctccacaaattcataccgcctgctgtacccggtataaaaagtcttgcagttcccgcagctctcctcatcctgcacgtcataaaagagctgtatcccgatctgctccgagcccgggatctggtatctctccatgacacttttcagtatatgcctgctccgtccgtcataggagtacatatactgcctgtccagaaattcccccggctccagcctgctgtgcagctcctcatcctgaacggccagcagatacgcgggcgatatctggaatacatccgcgatctcctcaagcgttgcaacatcaagagatatgagccctttctcatacttggacatggtggacttgcttttatgtatcttcttcgccagctcctccagcgtcagtttgtaagcaagccggtacttcttgatgttcttccccacattctcatcaatagccataatgcctccgtttcctataaatcacctttttcatgaaaaatccccggcagaataattcctttccttttttcacggcaatttatgttttaagtttatcataaatagataaacacacgaaatgtttcctgtcaagacacttcgggcaatttgttttgtttattatttaacgatagaatgatatcaatacagaataaaaagcaaagggtgcgcagaatgaaaaagacagaaagaaagaatatattgataatcggatttgccatattcgccatgttttttggcgcgggaaaccttatatttccgccctacctcggtctgatgaacggaaaaagctggtttctgagtttcctctgttttattctcatggatatcgggctcagcctgctggctcttcttgtcgtgaccaggatcggcaggggaaccgagggaataacggaaaaacttggcagactcccttctatattaatattgtcgctgaacgccatatgtctcggccctcttatcgcaataccgaggactgccgccactgcgtacgaattttccgtcgcccccttctttccgtcatttgacacgaagatattttccctagttttcttcctcgtggtcgtgctgttctgcctgaggcagtcgaaggtcatcgacatcatcggtacgttttttgcgccgctcatactcgccgcccttctcttcctcatcataaaaggcatcgtatccccgctgggcgccatagaacttgagtctgcggcccatgccgcagtcagggatgggatcaacgccggctatcaaacgatggatgtcatggctgccatgatattctcagcctccatactgctcaccataaagcagaaaggatataaagacacgagatcacagtttaagatcatatccgcctccggccttctcgccacgctcatcttatttgtagtgtacggcggcctggcttatctcggcgcgacagtgtgcgcacagtttccggcagatattgaccgggtggcgctgctcatcgctatcgtaaaggcactgctcggagagaaaggtatggtcctgctcggcgcactcgtatgcgcggcctgcctgacgcccgccatcgggctgctgtcctcctcggcttcctttttcgagaagcagacaaaaggacggatcagctaccgggcatttgtgtttggatttgcaggcatcagttatgtaatctctaattttggtataaccagaatactggcactggcttccccgatcctgaatattttatatccagtgctggttcttctggtcttcatgggactggcggaaaaatggcttctgaacactgcagtctaccgcttggcggcgcttgggaccattgtcgtgagcacactgtccaccgtctccgcatatttacccgtaccggtaaatatcgccgcgcttccgctatatgaatacggtttccagtgggtgctgcccgctgccgccttcggacttacaggctatatcctcataaaggaaaagccggcccggggccggcgtatattcggaaatatcgtcgtcagaacttaatttctcaaatattcctttgtaactctcaccacctggccgctcagcagtatgagggcggtcaggttcggtaccgccataaatccattgaacgtatccgcaatttcccacacaagtcccggcgctatcacgcagcccggaagcagcatcacaatgtagatcaccttatacacgatcgcagacctttccccgaacagataagcaaatgtgcgttctccgaaataggcccagccgacaatagtggcaaaagcaaaaaatatcatcgacagcgccagaaacttgtcgccgccgggtatgaccgtcgcaaacgcccttccgcacagcgtcgtcccgtccacattttccacgccccgcgcgatattggcaagaaagccctgctggtcgtagacaccggaggtaaggataacgagagccgtcacagtgcagaatacgatcgtgtcgataaacacttccacgatcgcccacattccctgcaccggcgcagaatcgatatctgatgccgcgtgggccatgacagaagagccaagccccgcttcatttgagaatacgcctctggagatccctgtcttcatggcctggcgcatcccgtagccgagcacgcctcctccgacgctctgtatgttaaacgcctcggtaaatatgagctgaaatgccttcggtatctctgacgcgttcgctgccagcacgatgacgcctcctgcaatatagaaaagtgagatcaccgggatgagccgctccgtcacagtggcaatgcgccgcacgccgccgaacagcaccatacctaccagcaccatggcggcgaacccggtgacaaaggtaggaacataaaaggcttccttcagtccccctgccattgcgttggcctgggtcatattgcccataccgagcgaagcgaaaatacagaacaccgcaaacaggacggccagccatttgcagccgagtccccgctccatatagaccatggcgccgccgacccacttgccgcttttatttttgtaacggtaaaggatgccgagaacattttccgcatacatggtcatcatccccaccaccgcggacacccacatccagaatatggcgcccggaccgccggcgataagcgccgtcgccactcctgttatgtttccggtaccgagagtcgccgccagcgccgtacaaaatgcctggaactgcgacatggactgcgcgtcatcggtgcgccttacgtttctgttgcgaaagagctggccgagcgtcatcccgagccatacacgccacttccggaactggaaaaaaccggtgcgcacggtaaaaaggagcccgaccgaaagaaagatgatgagcatgccgcggccccagataaagtcaagaagaacatcgttgacttgttttatgtactccatcattgtcataaataactcactttctgtccatcagctttgcatatatgatacctgccagcgtacttacacccgttgccacaatagccgctcctactatagccgcgggattgacgcttccgtactggctccggtacgcgataatattgaccggtatgagctgcagagacgagatattgataatcagaaacgtacacatctcattgcttgccgtgcgtcccttagacacacctccaagcagtctttttttgtcctggtattccggattgcccctctcccgctcaagctctgccagactgtccatggcctttaatcccgcgggagtggcggcccacccaagccccaggatatttgcgatcatatttgtcgtgatatgttccgctgccggatggtcgatcggaagccgcggaaagagaaagcggataatgggacgcattcttttggatacgctctttatgatccctgcctttgtggcaatctccatcaatcctacccagaaagacattacgcccatcatcgtgatacagagcgtgatcgcctccttggacgagtctattgcggcattggtcacatccggcattctgccggtgcacgcggcaaatataatgcccagcagtatcattcctgcccaaagataattcagcatataatcattccatctacgtaatatctttatatcctatgccgggccgcagtattatatgtttgagagcacacacgagccgctgaagccgacagtatgccggctgcgtgcatatctgcaacgcaaaaagagccggatccggtaaatggatcccgccctgcagttccttcttcttgctttgcctaccggccgtcttccggcatatccacttccccttccctcagtaccccgaccagcctgccgatcctcttatactgtgtgtgggaattgatatgccagtggtctatcgccccgttcagcgcctttacatatatatccctgttcctcttatacactcttcccatgaacaaaaatcctccccgcataatgatccatatctccccgtttttcgggtcatagtcgtcatcatagcggaagccgagcagactgccttccgggaacttcggaaaaagtacgtgcgtgctcagatatacacaaaacgtacacgcccggcttatctcattgctgctgaccatgatatccctttctatcctgctgtcatactgcgccaggccccctactatattcgtaaactcaaaacattttatttttatcttctcactggacgcgctgtgtatcatctggtcgtactcgctgtcaatagtgtatttgatatattctttcatattatcgggcagctttttgaacctgtatacgtaatctgcataatcgtacggaaccatcggttcccggtctgtaaactcatccagagagcagtccagcacctttgctatcctttccatggccgcaaagcccggattctctgtggcgccgctcccgatctttgtcagagtgctgtacgggaccccgctcagccatgccaggtcttcaaatgtaaacccccttttctgcattatgagctttattttttcgttcttcacatttctccacctttccatttttggaaattttcggccttacgtcaatattgatttattataacatatttcctataatcagacttattgttactattttattaagcaaattgttcaaaaaagagaggggaacgtcatgactgacaacatttacacgtggacaccaatagacatccggctcaaccgccgtctgactcttctgctgaaccggctggagatctctcccaagctgaaaggatatctgtacctgaaatgcgcgctgtcgctctgcatcaatgacacggaatatcttaccggaattacaaagaaactgtatccgttcattgccggtaattacaatacgagcgctgctgccgttgagagggccatccgcacttccatcgatatactctggcattcacacgcccgaatgacctaccaggaactgaccaactgtttttctgacgaacggcccacaaacgcacagtttattgccctactgacacataccattctttttttgtgataaatttctcacaatttcaatttgaacttttattttttttcgctttttcctacaattattgacttttttagacagattatatatactaagtttagttcaattttcaacaattgacgaaaattattcagaaaacacgcaaaaatgaaaggaggaagagagtatgtggggacatattttcgacttaagcaatccgcttgtaggcaaggacaacacatgggtgctctgggctatctgtgccacaggcgccgctgctgccatttatctggaacagaggtataaatgggcggcaaaaatgacgggagctatcatcgctcttatcttcgccatcgttttatccaacttcggtatcattcctatggacgctcctgtatgggacgttgtgtggggatttgtagtaccgctttccatccctctgctgctgctgcagtgtgatatgagaaagataggaaaagattcagggcgtatcctgatcatcttcctgatcggctccgtaggtaccgcctgcggatcactgcttgcttacacggcactcaacaaatttattccggaactgggaggacttgccggagtatttaccggaacttacatcggtggtactgttaacttcgcagccctcggcgccgcattcgacgtatccggagagatgatctccgccgcgactgtagcagacaacttacttatggtattgtatttcttcctgttgatcgcaatgccgtccatcggtttcttccgcaaacacttcaaacatccttacgtggatgaagtagaggcagcgggcagcaacctgaaagacaacgagacaaacgcttctgctttctggggaagaaaagagatctccttaagagacatcgcccttgcagctgcaaccgcgtttgtgatcgttgcgttatccaacatcatcgcgaccggacttggaagcgtgattccgacatccaatccattcctgcagatcgtgaacacgctgtttggcaacatgtacctgtggatcacgaccatcgccatgctctgtgcaacatttgcacctggctttttcggcaacatcaaggggacacaggagctgggtaccttcctgatctacctgttcttctttgtgatcggtgttcctgcatctgtaccgcttatcatcaggaactctccgttactgctcgtattcgcggcgatcgttgttgcggtcaacatggtattcagccttgtggcaggcaagcttcttaagttcaaccttgaggacatcatccttgcgtccaacgccaatatcggcggacctacaacggctgttgccatggcagtatccaaaggctggacaaagctggttggaccgatcgtacttatcggtacactcggatatgttctgggaacctactttggactgatcgtcggaagtattctcggaatataagaatactaaactaaaaacagaaaggggactttgagttatgaattttgatgcacattctgatatctggaccgatgtgacgcaccactatcttgacggggaatctgatattttccgcaaataccactatgagcgtctgaaaaaaggtcagatcgaaggcggaatatttgtaatctggaatgatccacctttcgataaagagccgcttaagcgcacgcgtcagatgatggaggcgatcgcccatgaagaacctgactgtgcggatatattaaaagtggcacgttcttacgatgatatgatgaaagcccgggatgaaggcaggatgtatgccttcatcgggctggaaggattaaaaagtatcggcgaagacctggatctgattgacgaattttatcagttcggagccagacatgccggccttacgtggaacgaagagaatccgctggcaacaggagcactggggaatcctgaacgcggacttacagatacaggccggagagcagtgaagaagattcaggatcttggaatgattctcgatgtgtctcatctaaacgacgcgtctttctgggatctgcttcgggcggcggacggacctgtcgttgccacacattccaactgcagggctctgtgcaaccagcgccggaatctcaccgatgaacagttgaaggaactggccaggacaggcggcatcgtcggtctgaattcctttaacgaattcgtacatgatgtggagtcagaacagacagtcggaaatctggtaaagcatctcgttcgtatggtagaactgatgggaatcgaccacgtcggcttcggcttcgacttttccgagtttttatgcggagatacgctgagctcattcagcagccaggccaacccttacacgatcggtctggaggacgcttccaaagttccaaatgtcattgaagaaatgaaacgtgtcggattcagtaacgaagagatcgataaaatatctcataagaactggcatcgtattattcgagaggtcatcaaataacaacagactaaaaggcacagtcataccggctgtgccttttttatgcatataacggtctattttatcgatcccggctccactcttttctgtctcagcttcaggtacacgatctcgcggaacagcgcatagacgacggaaacgacaggtatgaagatgagcataccgacgatccccatcaggctgcccccgatactcaccgccgccagcacccatatggacggcagcccgacggaattaccgactacgtgcggatagatcagattgccctcgatctgctggagcacaagaaagagcgccacgaacacaagcgcctttaccggatccaccataaatatcaggaaagcgcctaccgcgcacccgatgaaggcgccgaagattggaatgagcgcggtaaacgcgatcacaataccgacaagcagcgcgtacggaagccggaacagcgccatggatacaacaaacatcccacccagtatgaccgcttccacacactgtccggtaagaaagctggaaaaggtactgtaagtcagcgagaagacttccagggccgcttccgcccttcctcttctcacaaaagcaaagagcaccttcttcgcctggatattcagcttctccttctgaagcagaacataacaggcaaatacaaacgctatgaaaaatgtggctattccgctcacaatactcttcgccgcggtgatcgtcgagtcaaggacgctccctgcgccgctgcggaaaaactcgatccccgcatccataattttattccagtcaaactccaggtcgttcacccatttcattacttccttattgttgtggaacaggtctgcggcccacgtctgcaccctcggtataaatgcctgtatgctctcccccagattggcaaaggttcttccaagctgtgggatcagtatgaacataacgatcccgatgacactgaaaacaagcagcagcacaataagcatactgaccggtcttgccatctttgacaacaccttgctcttacgcaccttctcgcccccgaacagatgacgttccacaaaattcatgggcacattgagcacaaacgcgatcgccccgccgagaatgaacggaaacaaaatgtgaaacacaaacgcaagtatatcaaatactttattatactcccaaagacataatacgacgatcgccgtaaatatgataagtcctctgattttctttacactctctttgctaaactccatcctaactccttatctttttcatcagctgtatcaccggcagattcagcagcgccagaccgtacacagtgagcagctctcccatgtccagcgtaactaccttaaagattccctgaagccccggtatcatcagaactccggtgatcaggaccaggccgagggcaaatgcccctatcaaatatatattattaaaaaatctttttgtgaacagtaccggcctgccggacttacagttaaaaccatggacgagtctgctcgcgcagagtgtcccgaatgccatcgtgctggccagggcactgctgccgtgcctgtagccgatataaaatgccgccatggtcatgatcccgatacacagtccctctgtgcctatactgagcagatacttccttgtcagtatcgattccttcatcggccgcggactttcctgcatgacactcttcgtatgtggttcaaggcctagggcaatagcaggaagactgtccgtcaaaaggttgataaacaacagatgcaccggtgcaaacggcaccggaagcccggctgcagacgcatacagcacagccagtatggcgccgaagttgccggataaaaggaactggatcgaattctttatattctggtaaatatttctgccgttttccactgccttaacgatcgtggcaaagttatcgtccgtcagtaccatggaggcggcatccttagacacctcagaaccggtgatacccatggcaacgccaatatccgcctgcttcagcgcaggggcgtcattcaccccgtctccggtcatggccactatattgcctttctcctgccacgcccgcacgattcttatcttgtgttccggggagactctcgcatataccgagatcttctctacaaaatccctcagctcttcgtcagacatatcctcgatcaccgctccttcgcaggcctcggaatcatccttcagtatgccgatctttctggcgatcgcggctgctgtcactttatggtctccagtgatcatgaccggctttatcccggccgccttacattcggaaaccgctgtctttgactcttccctcggcgggtccatcatagatataaggccgagaaaagtgagaccgtcttcgtcatccagtgaaagggcgcgctcctccttcatttccttataggcaaaagcgagcacccgcagtccgtctcttgagaattccatattctgtctctcgatctccagacggtcttcctctgtcatctctctggccgtttcaccggtttttacagcggccattcgtccgagaagtacatcgacggcgcctttgacgacgacgagattccttccgtctatctgatgcagcgtggacatcagcttgcggccgctgtcaaaaggaagctcagaccgtcttggatacgcgcttcttatctcacctgcatccacgccgagcctgctgccgatattgatcagcgccgtctctgtcgggtccccgatctcctgtccgtctgtattgaccgaatcgttgcagagcatactgaatatgagcagctgcttttcattacagacagacagatctatctcttctgccggaacacgccgtccatccacataataatcttccacagtcatcttgttctgggtgagcgtacctgtcttgtccgaacatatgacagacacgctgccgagtccttcgacagcctggagcctgcggatgatcgcatgttcctttgccatcttctgtgttccgaaagaaagtacgatggtgacgatcgaacttaacgcctccggaatggccgctaccgcgagcgctaccgcaaagaggaacgcatctgccacagaaccgccccgcacgacattcactgcaaataatataccacagaatatgaggattatgacagacagtttcctgccgaaatcatccaggtttatctgaagcggcgtcttcttctccgacgtcgttttcaaaagcctggcgatccggcccacttctgtctccattccgactgccgtgacctcaaaggttcccctcccgtaagttacaaagcttccggaaaagacccggtttgtctggtctccgagcgccgccccctccggcacttcatccagcgatttttccaccgataagctctcacccgtgagggcgctttcatccgccttcaggctggcaacttcaaggagccgcccgtccgcgggcacgcagtcgcctgcctccagtatcacttcatcccccaccgtcacctcccgggacggtatccgtaccgtaaccccgtctcttacgaccttagcctccggcgcagaaagctgtttcaggctttttaaagactgctccgccttcacggtctgcacagtccccaggacagcgttgatcgttatgaccacgaaaatgaccgccgcgctttctccatctcctaaaaagccggatacgatagccgcaaaaatcaaaatgataacgagaaaatcctcaaactgctcgagaaaaattctcaccgtactcttctttttaccctctgccagttcattaaaaccgtatttctcctggttgatcctggcctgttcacttgtcagcatatgttttcctctctttcctgcaatgagactctcttttctattatttccaactgtatataaaaagagacctctattgcataatttaatatgcaataaaagtctcaccatttcattacgatacggatgactgctcatcgtactgacgacatcgtaaacgcaggcttttgccggcgccagttactcccttttattatttcataatatacctaataaaacaaaaaaagtcaatataaatcgtcataatatttcattcccgccgatctgaaactgattcttcccgtgctttttcccttcgtacattgctttgtcggcggcgttgaacagttcctcgtacgtgcttccatgctcggggcatgccgcgatccctatactgaccgtgatctcaaatttcatctcctgtgagcattcctccagtgctttaaagatatcctccgcctttttagccgcagcctttctgttcacggttccatccatataggcgacaaactcgtcccctccgatccggcatacgatatcacctgacctgaacttcgacttcagcagccctccaatgtgagcgagcgccttatccccctgacagtggccgtactgatcgttgatctgcttaaaattatctacgtccagtatatagagcaggcctttccgggacttagccatcttacatcttatgatctcttcccctgcggctttgttatatatttccgttagaccgtcgagccggacttttttgagaagctgctgctctctcttgatctggctgttgatatctgtgagcttcccgatcaccgctgaagggtgattcccgtcatatacgtaacggtactggcattcacaccatatataccggccacatttgtctacaagccttatatttaccgcatggatctctccgtcattatgaggtgtttttaaaatatcctggaacatcttctcatcgtcgcggtgcagttccataagatttttattctctttcagataacggctgctttccagatgattcacccggaatttaagttccgcattgggagagataactgccgtgtccgcactgtacgtatactggaacattatcgtgtcggagaactgtgcaagaaccatatatttttttgcttccagagactcttttcttcttttcgttatcatataccacatgatcatgccggcggcaaagacgatcattgccagaacgaccatgctcgtctgaagcatctgattcatcagcatactggaatggacgtatattttattctccttcacaaaatcaacgatataccagtcattgtacccgagcggagatatgccgatgtaataccctttgtctgtttttctgtttaaagccccgacaaatatatctttatcctgagcgagcgcctgctctatcagtaccagaatatcaccagacacctttttctctttcagttccttctccagtgtaggccgcagctgcttatcactgtctctgagcggcacaaagctgccgtcgcttttgacgacacagctgctcaccacatcaatgtcccctgacttccagctcgtgtccacaagctcctgtgcgtccgccaccgtacagagcacaccggatatgtcccccggcccgccaaacagcggtacggctatactgtacctgtattccgcgtactcttccttacagctcacatctgtgatcacttcctgtcctgcccggagcaatgcatatatcctgtccttttccgctctgtctgcttcccctccggctgccgattccacgaattcatccagcgtcatgtataaaacagaatatctgctctgttctttatttaccgtatccagataatcctgcagcttcccgccgcttatgccggctccttctgtttccgccagcgaccgtatcgcgttcagagtgccgctcacgtcagaatgaaaagaatttacttctacagtctgtgctttgacataggacgaaaggttatcccgcatcaattcgttatattccctgcccagcctcgtctgatagtggataaacacactccagagcacagttatacagatgaagactgccgctatatttaaaacggcagtctggccgatgattttaccgctgtgtttttctatatggatgaaatggccttttctccggactgttttgtcttcaaatttaccattctttctgaacctcatacgaatactatccccacattctaacgtttctgcatctcggtataataaaatcccttcaccggatataatataacatccggcgaagggattttttgtcgcattttgtcagctgtcaaacacaaagtattttcctgcaatataatttaacgctataacgataatattggtgaatatcttcatcacagtaccctgaagggctaagatgtccacgagcagaaacataagcgcaagttccagtacgccggtcagcgccctgcagccgaagaaccggactgcctccccggcgactgtcttttggctccagtttctgctctcaaacacaaatggtttgtttgtaagaaaagcaaatacaacagccatacaccatgcggcggccgtactgtatatatttgggatttttaatatttggaaacagatataatacactgccacattgacaactgtagttaagatgccaaataccatataagccgttatctttttatattttgccatgcaaccgcctctttctccttataatatccgctcctagtattacggccgtgataagcgctgccgcaataccggcatttctccccggcgcgtgatagacaagtctgatctcatgtgagccggccttcagaggaacacctacaaacgcggtgtttactctcctgatcttctgctgtctgccgtccacatacagttgaaagtttttatcgtacgggacagatgtgatgagccatcctccatgttcggactctgccgtaccctcaaggacatttccggcccctgtaacttcaagcgctgcaggctgtctgtacagctcggctgccgcctcctccccggccgtaccggtccaggcgcggacattgctgatctcgtagttcccttttccgaattctacagggagctctgtctcccccgcctttaaaggtgacgtataatggaacgtagtattgccattatagtatgccgcctttctggcgctgagcttattctgctctccgttcacagtgactgtcacgtcgtcggaaggcctgttgttcttcacgtcaaattccagaaacagatacgtatcttccggcatatcactgtctacagatacggagccaaaggaggcattcccttttatgactgttgtactgatatgtgcgttcaccttttttacatttaccggaatgtcatccactgtatcaggcgtatctgccactgctgcgccaagcagcgccagctggcgctcaggataagacagatctgaataagtatcttctgatatgatacggtctgtcacataagcagctggcgcggcgtttttattttcatatatattcacgcttccgctctgccctatcttcacatagccggccggcgcccggtctcccactatatagcgcacgcccatgagccgcaggaaaatgggattgtctacggtgtccgccataaggctgttcctgctcggtttactaaggttcagcactttattgcggaattcgctgtagtacgaattgctgatggaagaatatacggtcgtcagattctgcccgcaggcccgcacccggttctggctggctttgttctcactgtatccgccccttgtctcggtccggtaaaagcctccgtgcagtacagaccttaccgctttttcaatatccggatcttctatcttattcatatcggccgacgtgaccagttcccctttcagcacggtgcactgacctacgcagagaaatatcatcactgccagcgtcacagcacacaacgcctttttccaacagaccatgctgagcaataccgctgccccgcagacggcaaagtctataaataaaagatacttctcctgtcttgcataactgttcgtaagcagcgaaacagtgatgagcgctccggccagaatgcaccctcccgccgcctggcgcgctttaagcgcctggttttcaagcctagtaaaaaacgctgccgcaagccagcacagaagcggtagaaatgggataaaagccttatccctcagatagagcccaccgttcagcagccagtcaaatacagggaacagaagcataagcagcaacagcgctgccatgaatttctcccggcactttttataaaatatactgatacacagcatgagaagcgcagctgccgtaagacccatcccgtatccgctgtataatagcttatgaaggcgtatatcaggaatgagaagctttgaaacagtgattcctccatgcccggcacggcccgctgtcatggcaaagtaaactggtatcagatagaaaagcgatagaaagcatccgaaaagcgccgggtaaaaccgcccccagagccacttaatgaacctcaggcacgaggatatgaggcccccggactcaaccgtctcgttttggtatcctgtcaccccatagatgaacagggccgccatgccccctaccgcaaaatagaagctcgtaagtatcatgaagaaaacggacagtgtcaacaggccgtactttccctttttacagtaccggtcatagccgatcagcgccagcagcagaaacggcatatagtttacgaacatcagctgcatggaggaatgataggtcacagatgcggccagcacaagtatcgaagaagcataaaagctttcccgctttttaaaatgccccctgctgagccagtaataacagagcactccgtccgccatatgctccagcagcgagacgacctgaatgtatgtggtcatctttacgaagggcagcgcgtatgatacgagatacaacgggttaaataggccgtaataggcaaagttgtaaatattctgcccaccgccaagctctgccgcgaactggggaaacagtgttttcgtctcataaaacagcttgcggaaataatccgggaatacgctgtgctgcccgagccagtcgatctcagagcctgccagatatccgtttcttatcttcaggatatacagtatgagcgggatgaccataagaatcgagagatataacatatcttccctgctttttgttgtctttgccgtcggtttttgcatcctcttcatcacttgattccctcaataaatagattggcctgttttttatctctgtgtatgccctggcaaggtactggcctgaaataccaatgcagagcagctgtacgcctcctatgaggaaaataacacacatcatggccggccagcctgccaccgggtcatgccagaacaagttctttaccacaaggaatacgatcatgcagaacgcagccccgcagaacagaatgccgccgtatgaagccatggacagcggtactgtcgaaaaaccaagtattccgtcgatggaatatttgaacagcttccagagcgaccattttgtatcgccggccgcccgctcaacattgtgatattccagccattttgtcctgaaccctacccatccgaataatcctttggaaaaacggttgcactcacttaatgatagtatggcgtccgccattttccggttcatcatacgaaaatctctggctccctccacgatctgtacctgggagagcttatttataaatttataaaaagaagcggaaaggaaggagcgcagcttcgcctccccgtgacggtcacctcttctcgtggccacacagtcatattcgccttcctgtaagatatcgtacatctcagggagatagtcaggcggatcctgcagatctgcgtccattaccgcgacatactctccctgggccgccttaagtccggcgtaaagcgctgattcttttccgaaatttctggaaaaggagagataccggtaattgttatctctttcatgaaattcttttaaaagcttcagcgtttcatctgctgagccgtcatcgacaaatatgatctccacggtcacaggctccatcttctttatcacatcctgcatggcctgtacataaagaggcagtacttcctgctcattataacaaggaacgaccacgctgactgcaggtttattatctctgtacatcataagacctccttcttaatgcttgattgcttatgtctgactgtaattatatatatagtatctatcattttccgaaagaaaatcttaagtttaagtaaagattcaaaattacagaataaaaaacagagtatgcttttcacatactctgccggaatttttacttttttaaagaaaacggcaggaacctttatcacaaaggattcctgccactctcattcccatgagcgtgcggggattcgaaccccggacaacttgattaaaagtcaagtgctctaccacctgagctacacgcccttatacaattttcacagtaaagaaaatgcccagagccggaatcgaaccagcgacacgaggattttcagtcctctgctctaccgactgagctatctgggcatatcttattgaacttttgtagttcaataagcatcaattgcgggggcaggatttgaacctacgaccttcgggttatgagcccgacgagcttccagactgctccaccccgcgttattaactaatattagattatgaagccgttgaccggacttgaaccggtaacctgctgattacaaatcagctgctctgccaattgagccacaacggcaagtctggtaatggatggagaaggattcgaaccttcgaaggcgttgccaacagatttacagtctgccccctttggccactcgggaatccatccattttcatatgggacctatagggctcgaacctatgaccctctgcttgtaaggcagatgctctcccagctgagctaagatcccatatagcgacccagaagagactcgaactctcgacctccgccgtgacagggcggcgctctaaccaactgagccactgggcctcgctatctgaagatatgtaccttcaaaactgcatacaagaaataaatattacatccattacctatccaccttctcgcttcgagatgcgcctt

SEQ ID NO: 428 - DNA, 25190 bp, Extibacter hylemonae
  source 1..25190: mol_type = genomic DNA
gctccctccaacgccccgcagcccactgccgcccttcctacgcctgacatcacacaaagctcaaatttctccaacgcgttagattccctggcaggacaaatggatttacatgatacaactttattcatcgagacaactcagggaatccccaatttacccccgtctgctccgcagggcggtccctgcggctatcatgacgattccggcaatgagcagatatatcttttcttcgtagcttcctgctgccattgagaagggatagagcattttcagatacctggcgccgcttcccatcgctacgatatagtagaataccggcaccatatacccgatgaccaggttgtcggccaggccgtagcagagcactccgagtccgcccagaaagagcatttcggccagggtccccccataatatctcagcacatccatctcgcagttattatagcggagcatccacacatagatgccgagaaagattcccattgcaagtatggcctccgcaatgcgcacagcatataccgaagacgctctcatatacttggcgtacacaagatcccgcagatccttattctgctccgggagaaataccggggtcaaaaggatgataccggtcagcgccacgtacatttccagcactttggccgtatccggcgcttcgagattggaaacgccgagcacgagcggggaaagacacagaagagcggcagtcacaagcagatgcggtaatatattatgctttagatttatttttccgatttgcagatatctttccatgtatatctatcatcccccttcttttttttgcatagatccagatagcggctaaaacgagtacaacagaaaccgctgcgtacagcgcccggtttgccgcaagctgcgcaaaattatcatggaacccgacgtagttgcctgccgtattatgcctcggcacaaaggaccagccatacttgccgccgtccatgccggacatgctgctgaaaatggacaggaaccaccagacgccctgaacgagcacgccgagcgcagtgtctgtcagaaccgtcaggacaagtcccacggccgccgctgtcatcacagaaggcaggagccagccaaaactgtatttgacaaatgcaaaatgatcgatggagattcctgcctccgcggcgtaactcatacattccgccagcggaaaacacgataatatgagcaccggcaccatgagcataacgagcatcgccgcatatcggcttgcgattatgactgcagaggatgctttccgcacggctatgagctcctgcatttgagcccgccggtctctcagtccacgcgtcacagccagaaataccggcagtattgacagcatgatccccatgtaatcacagaacagccgcgcatagcctcccgtcaaatggtccttttccacaagcgtattatactcttccatggcgtcttcgtacgtcatcggttccatggcgttggatttcagcatctccgctccgtaggaggaccctccgccgagcatatcgtccacctcctgcataagcttctgaaaccgttcatatgacagccctttgacaggcggcaccgacagaccggtcattattacatcgcccgtattataatgctcagccatcaagtcttcgatcactgtcatatctgtgatgccggtcgtctctttcactatttctccgattcttttattttcttctttactgggtttcactgacttatgaaaccctatcggatatgtgctgtacgtccccctgtaatactcttccgccaggctgcccagcgtatttttcatgatcacctgtttgtcatcactatatttcataccgtactcttcctgacctttcgcaggctttccggttatctcaagctccccgagctgagagaaaaagaacagtgtcagtacaatgactgtcagccagtagataagacttcttaccgtctggcggcactctttggcaaataaggaacagaacattattcttcccccctctcgccgcgcatcagatacatatatgcatcttccactcctgcctccgcaagtctggctgacggaaatggagttttatctgccagaaaacggacgataacgttattgccaagcgtcagcatacttgtgacaatatacttactcttaagcgctgtcagttcattcctgctgatttccgcggaatacaccttgccgtccgccatggcggtcagctctgccacagagccgcggtaaataatctccccttcattcagcacagccacctgttcacatgtagcctcaatgtcccctacgatgtgagtagaaagtataacgatcctctcctctgcgatctcacagagcagattgcggaagcgcacccgctcctccgggtccagccctgccgtcggctcatccacaataagtaccttcggatcgtgcaggatcgcctgcgcaattccaagccggcgtttcatcccgcccgacaatgctttcacctttttcttccggtcgtcctgaagattgacccttttcagcagccccggtatcttctttttccgctcccctttgctcaatcctgacaatactccgagataatccattgcttcatatacggtcatattcgggtacatggaaaattcctgcggcagatatcctgtcatgctccgtactgcggccgcatgctccaccggtacgccgcatatgcttatctccccttctgactttggcagcaatgttgccagcaccttcatcagggtagtctttccggcgccatttctgccaagcaggccgaacattcctttttcaattgtaagatccacattttttaacgcctgcttctttccgtagaactggttcagatggcgtatctcaatttctgtagtcattttgcctctccttttctctgccttttctgctcctatcatagacagaaaatatctataatttctctacaaagaattaagattcgctgtatatattataaagacaattgaaagaagccgtgactacagcgccgccgtacatgctgtttgctatgctcaaagtaccgccgtgcttcccgcacaggagcgcgcagatgtgaagccctataccaaaatgctcctcattttccccgtgctccctgtaatagggcaaggttgctttctgcagatcctcttgcgtaaatcccggcccgtcgtctgacaccgccagcagaaatagtccttctgcactgtcatattccgccgatacagtaattctgcataccgcataacggatggcattggacaaaagattttcaaaaacctccgccacaatatttttatcaacatatatcctctgccctgtctgcgcctcttttgcgcagtccagggtgatctcgatatcttttatctgattcagcgcaaaaatgatctccctgatctcagcatatatactcgccgcgcctgtctcttccggattcacaggacgttcttccatacttcgtatgcctttcattgttctgctgaactgttccagcctgtccagatgggaggacatgagcttcagtgtatcgagcatcttctgttcgctcacttttccctgaggtatatatctggcaaggaaatcggaatatcccttcagcactgtaagcggcgtcctcaagtcatgtgcaaacgctgcgttgagcctcttctggccttcgatcctctgccacagctcttccttattgtggatgacctccacccgcatcatgtcaaaagaacggcagagctgtcccatctcatcctcgctgtcgtaagtaacatggatatccagattattttgcctgatctgctccgccccattttttaatataccaaacggacgcttcaaccgatttctgtaaaagagaaaaaccgctgccaccgttcctgaaaagctgtagaaaaacggacaccagacgcgtacgatatccaacataagcatcatctgcctgtcatgtcctttgaagcccgcgaaatcttttgcccagatgttccagttggcggctatagaccagtcaggccataaaagaacgccgtttacttcgttgtgctgcatcatatccgcatacttattccagatgatactttcaaaacggtagcatactgtcattgtcacggcagacagtatgaccgaaatgagcgcggcggcagcgatataggcaagcatggctttccggaaggtaagatcgcgtatccacgttttcagttgttccgccttctcttctatccaatccatttatatcccactccccacacagtctcaatgtatgatttctctgtatattctgccagctttgtgcggatccggcggatatgctccgtgacgatgctgctgtctcccgctccgtcgtatccccttgtcttctcgtacagctggtctttgctgaatacctggcccggattcatggataaaagctctacgatatcaaactccattttggtaagatttacctgatcgttttcataataaacactccgctcactgtagcggatcgccagcctgtctgacatcagcacggaaccgttcagacgtttccgttcttccctgcggagatgggcctccactcttgcgcccagctcttctatcgaaaacggcttcatgatataatcgtccccgccaagtttaagtccgttgatcctgtcctgttcctctatcctggcggtcagaaaaaggatgggacacgatatgtgcgaacggatccttctgcacacttcaaagccgtcgattcccggcatgctgacatcaagcagtatgatatccggcttacgcgccagcttttccagcacctctgccccgtttagtgcttccagcacccggtaaccctgtatttcaaaataatctttcagtaattgtatgatcccttgttcatcgtctgcgatcaatatcttatattccatagtcctgccgccttttttataatcaaatacccggaaacagctcttatataccaactgttcccgggtaattataacacagaaatcactacaaattccctatttactttgtttagaatattcttttactccactggtattttctcatgtccactctgtcttcctcaatctctatcccttcctcctcaagcatgcgggcctgccggttgactcctcccgacaaaaatgcgccggacacgcgtccttcctttgtcacgacacggtggcagggcagatgcatggagtccggaacgacatgcagcgcatagccgacgacccgggcccacctccggttgcctgcaagctcggctatctggccgtaagatgccacctttccctccggtatctgtccgactacatcgtagattttatcaaacgtattcttctctttcatttatctccacatccgtacactataaatattttttcagttcctccacattgtgctcttccatcttctgaagctctttcataagggaaataatatccttctccacatctccctcatatttgtgcagctgttttgttgcctccacgatccccatactgctgcccttgatgagcatatccgctatatgggaggaagacttgtcgatcagtgtcttcatgttgatcatcagataagaggttatcttttccatgccagggatccccttctcatcaaagccgttctcattgagcatcttctttgctttcgtattgacgtcccggtaaccgccaagctgcttctcgaggcactttctgaagtcatcgttgtctacgatctccagcagctgctttaaagattcgattcccatctgcgtattctggtaaacataattcagcatttctgcatttccattcatgtgtgttccgcctttccactttttaacagtagtattggcagtcagcacaagtcttatacgcctatgcagacggatactttgagactactatatcatatttcgcccgaacctgcaccgtttccggtcatatttacagcataaagcaagcgcaggcagccggacgtcccatccggccagctccttaaagctggcagaccttcgtggcgatcttttctctgaacgcctcgtcgtgttccacaaataccattgtcggaccagcattttgtataagctcttcgatctggagcctagacagcacatcgatataattaagtggttcgtcccagacatacagatgcgcctgttcgcagagacttttggcaagcagtacctttttcttctgcccggcgctgtagtcggcaatgtccttttcaaactggacccgtccaagatccagcttgcgcagcatcatcttgaacagactctcctctattgcgtactctgaggccagttccttcagatttcctctcagatgggaggcgtcctgcggcacatacgatatttttatgccgctcccggtctgcatctgtccggtatggggaatatcctcccccagcagaagctttaagatacttgatttaccgcacccgttcctcccggacagacagattctgtctccgcggcagatctcaaaggatacaccgcggcacacttcccgctctccgtaacggacggagacatcctgaagctctgccagccggtgcgcatggtacgcaagaggctccagtcttaatgtctctgcaaagtcaatatttttcagaagctttgacttttcttccagcgccatatgctgccttttttccagaactttcgagcgtttcatcatcttggctgccttatggccaatggcgccccggtccgggcggagtccggccacgcgttctcctttcttggtcttctcaaccttatccgaccagttctccgactgcctggccgccttcgtgagtcgtttgatctctgatctcaacttctcattctgcgccgcctccatccggtctcttgcctctttgcccgtataccatgtcgtaaaatcacctttctgcacctcgatatccatcttattgatggacagaatatgatccacgcacgcatcgaggaaatgcctgtcatgggagacaagaatgaaccctttcttgcggttaagatacgcggccacctctgctcttgccttcgtatcaagatgattggtcggctcgtctatgagcagaaaccggccgctgccaagaaacagcgccgccagcatcaccttcgtgcgctcgccgtggctgagtgtgtcaaactccctgtaaagcacatcttctgccacttccatcagattcagttcccgcatgatctcccacacctgtgcctggggcttcatctcctgtacgatctccaccgtcatgcggcctgcatctttcacctcatatggaaaatattcaaattccacactggcggaaatcgttccgtcatattcgtatttcccaagcagcagcttcaggaacgtcgtctttccccgcccgttccggccgataaatccaagtttccagtctgtgtctatctgaaaagacacatgttcaaatatattgtcatagctgctctcataagcaaaactgagatccgttacattgatcattgacatatacacatacctcctgttaaaagatcagatcacattaccttgtttctctccgaatagaaaaagccgcaggaaagtacattcctacagccttctacacgcaactgacctccggcgcccgggccggaagatatctgtatagttaaagacggacggacagttcaactttcctgctctgcgcacggcaaaaagacacgatatatgtaaatatcgtctgaaagcctttcccatgcacttaaatcattagcaagaagttgaattcatcctttcatctcccatctttttataatctgccccgattatagcagatacgctctgtcaagtcaataaaaatgcttttcctgcagttttcccccagacagttcatatacttcctccgccatatgagccaccgcttcatttatgtactctgtttcacttcagcatgaaaatcagtaaaagaaaggcgcactctgtccgttttaccgcggacagagtgcgcttttggcactaaactcacttatgtaaaattctcgttatttatggattatatattatcatatgcaaaatcgcagtctcatctcctgtatttttataagaatgagtgctgtcagccctaaaccgtaagctttcacctctgccgacagtaaactgctgcccgccggcgctgatctcaacgcagcctgcaaagatagtgataaattcggtcgttcctttcaggtgcggctctgactcccaataacttcctttatctaattccaggtaatagacagcaaatctgcggttttcatcgtccgggaaaacaggataattctttacccttcctccatcttcaagcagcggctgtatttccgaagtgttcacgatctcgtaagaagtttttggacgaactgtcaaatgatcgaaaggtaccttcatcccgttcgagatcttccaaagcgtggatatggtcggattagcctctccacgttcaatctgagcaagcatgcttttactgacactgctcagttttgacagttcctccatgctgagcttattttcttcacgcagtctccgaatatttttggcgacaatcatgttcatgggatccataaatgatctcctttcctattgacaatatattgtgcatattgtattattatatcgtacaagtgcaatataatattctctttgtatcattatataatttttgtccggacttgtaaagagaatatacaattaagcgtccttcatttatgaaggcagaggaggtccaatatgtttcatttatctgattttctgatctactgttttgtcacagcgtataccccgggagccaacaatttactgtccatgagtaatgcggtgcggcttggcatacgccgcagctaccgttttaatctcggtatcctggccggatttgtcatcgtaatgacggtttgtatggtgttcagcacgacgctgtttgccctgctccccaaatttaagtttgttatgcagatcttaggggctgcctatatgctttatcttgcgtggaaggtctggaaaagttctgttgatccaagcgcagaccccagtaaagaggccagctttctatccggcatgatactgcagtttgccaatccgaaaatttacatctatgcggtaacggcaatgacgctttatatcctgcctgtctatcactccgccggcgcactcattggtttcacgatccttctggcgctcgttggcgcgtccggttcctttgtctgggctctctgcggttcggttttttgtaaatatctctccagacatacaaagggagtcaatattgtcatggcgctgcttcttatatattgcgccgcctccctgtttctgtaacgcggcagtccaatcagttgccacggctttgattctgaacagcatactttatagatccgcctcacctggcgtctgcagcgctttggcatctctgcctctctttgtcagcagctgggcaatcacgcacaatgctacagttatcaccatgcagggaagcgtattgcccaccggcatgtcgatgttcataaggatgcggtatgccgcaaacccggccagccatacgagcaggctggctgcattgactgccgtcctgctgctgtcccgtttcagcaggaaaaagtctgcgatctgtatcgctgtcatcggcgcgaacacagaacctatcaggtagagaaaatccgtgatattgtccattgggaacagaatcgccgctcccgtcccgatgaccgtcacagcagccgcaacgtacttgccgttcagctttgctgcaatggattcgcttgatatgcccgccgaatatgcgtccagaaaggtagtcgtcactgtggagaaaataacgatgagaagcgcggcgatcccgagaccggccttcagcatgatctgggcgatatcatatactcctgtatatatggctgctcccattccgatcacatacatccagcagctgatcacgccatagacgacagcgcttactgcagtggctttcaccggactgcgggcctctctcgtataatcgctgatcagcggcagccaggacaggggcatggccacggacagttccaccgcggctccgaacgtcatcccttcgccggagatgatcccggcatgggcgccgccgaaaaatatcactttgctcagaatgagcgtcagaacaaacaatgccgccatggcaactgtattgatctttccgagatttgtgatgccgatggcgatccacagaaggatgagcgctcctatgacgaggcaccataaccacgcgcctgtctttatcaccccgtccgccgccagcgcgccgtcgtatatcatgatcgcggtccagccggccagctgcagtacatttaacagagaaaagagcagactgcctttttgtccaaagctcattttaacagtctccatggcgctttttctcgtcctggctccgataaggccggcaaaaaagagcatggtacacccgatgacgtggccgatgaggatggcggccagtcctttcccgaacccaagcggcgccagataagtgccggtgaggatctcggcgatggaaacacccgcgccgaaccagatcagcccgttttcaaataaagaagtacgcctcttttccattacaaccacacctccccgtccatatgttccgtttcgataaattcgcttctcaggtcaaatgcatgattcatcggaccgcttccgtgtccgaggtccagcatggcggaaagcgcgcctgatatatatgccttcgcccgttctaccgcgtcagccatgtcgtaccccttcgcaagatttgacgcaatggcgcttgacagtgtacagccggtcccgtgcgtgttcggattgtcgatatgctttccccggaaccatctcaggccgccgtcccggtacagcagatcattggcatcgttaagctggtggcctcctttgcagagtacggcacagtgatacgtcctgccgatatactctgctgctgcggccatatcttcttctgtccttacaggcatcccggacagctcttccgtctccggaatgtttggcgtcagcacttccgcaagcggcagaagctctgctttcagtaccgcgaccgcgtcgctgcttatgagtctggagccgcttgtggccaccatgaccggatcgactaccacgtgctctgcgccgtattttcgcaatgctgcagctgtcgcctctatgagcggaccggaagataccattccgatcttcaccgcgtcagggcggatatctgtaaatatattgtcgagctgctcctttagaaactgcggagttacctccatgattcctgtcacgccggtcgtattttgtgcagtaagtgcagtgactgcgctcatggcgtacacgccatttgccgtcattgtcttgatatctgcctggatgccggcgcctccgctggaatcacttccggcgatcgttaatgctgttctcatttttcttcctcttttcttcgcaaatatttcctcatgtgatgtgaggattagcattaattttatatagcggccgaaggtggtgcccccaatctgccgcttgacatcaacatcttgatgctgattcccagaataaatcaaacgctctgtattcactcatgtaaatatgtactttggcgcggatctcctcctgccggtcttcactggaagcgtcgtaaactccaacggtcttaaagccggatccaagggaagtatcaatagcatgcaatgcatcttcaaacacaagcgtttcctccggctccgttcccatacaggccgccgcctcacagaatatctttggtttatccttcccctcgcccacttcggtgcaggtaaatattctctcaaagtacggtccgatcccaagacgggtaaacgccgcttcgatcagatgcctgtcgcttgacgttgcggccgtaagcctgactccttttttcctgaggccttcgagaaattctgctgccccgggctttaaacgggcgctgtacctgtagaattgttcgatctgacggttgatcccacttattatgtctccggtgctttcaggcagtccgtaagtatgcttcagataacaggccccttcctccatcgtcataggatacagcctctgccctagaccgcgctccggcacgatctctctggatgtcagataacgttctccggcttcctcccatatgggcatggaatcaagcagtgtcccgtccacatcaaaaatggctcccctgatcatactcccaccatcttttctgccgcccctctcagttcccgggccgcctgtcttatgtcaggggcgccgaagaccgcgctgataacggcaacgccgcagatgccgctgcccgcaagcatgcccacattctccctgccgatccctccaatggctatgaccggtatctctacggctctgcatatctcctttaatgtatcatggctcacctccacagcgtcggccttggagccggtggagaacacggcgcctacgccgagatagtccgctcccctttcctgtgccagcagcgcctgctccactgtctgggcggacacgccgatgatcttatcatgtccaagcctggcccggacatcgccggcttccatatcactttgtcccacatggactccgtccgcgtctatggcggccgcgatttccacattgtcattgacgacgaacggaacttgaaagcttctgcaaagctgctgtacttcccgtgcctcccggaggaactgttcttcatccaggttcttttcccgaagctggataaacgtcgccccgcctctgattgcttcttccacctgagcggtaagcgtactgcctttcagccaccttctgtcagtcactgcatagagcagcagactctttttatcgaatttcataacgtgctccttcatccagtattttcccatccatattgtataccgcgtctatgatcaggctgcggtaggacgcatttccgccgccctcccgcatatacttaaagcccgtctctcccgcaagccccatggcgcataccgcggcggccgcggccttaagcttctgctccttattggcggccacaaaagcggtcatcatgccggacagctggcatccggtgcctgttatcctgcccatctcagggcggccgtttcgtatcacgtagcagtcggcgccgtcactgaccaggtcgatggcgcctgtcacggcggtgatactccctgtctctgacgcaaatgctttgacaaacgccactgcctcatccagattatcctctgtcactgcgtccgccacatcggcatctactcccttggtacttccgctcccccgggaaagtgtcttgatctctgatatatttccacggatcacatcaaactttatctctttcatgagcctggccgctgtttctgtccgaagactgctggctcccgcgccgaccgggtcaagcagcacggtatgtcccagttcttttgcctttctgcccgcaatgtacatggcctctatcgtccgtctgttcagcgtcccaatattgatattcagtccgctgcagatggaagtgatctcttccacttcctccgcctcatccgacatgatcgggcttcccccgcacgccagcagtatattggccacgtcattgaccgtcacataatttgtgatgttgtgtacgagcgttccctgctttctcacctcgtcaatacagtttcctaacattccttgatcctcctttaaaaacagaaaaaacggatatgccaaagtctgacatatccgctaaaaatacttacgctatatccctacgttggcattatccaaatcaggttacgggtcaaagcactgacagcttactctcagcccgctttccgcgagctccccttgttgctatgatgttttcacaatttttattatactacgttttccggattttgcaatgaaagaattatgttctgccgaaagcatcaatacttccgtatcgtatccctgctctcatccgacgatttatcaatggcccggatcactacataatacccgctgccgccgtttgccgtcactttgacacgctccccctctttatggccgagaatcgcttttccaagaggcgactctatgctgatgcgcccttccaacgagttcccgcgcacacttgtgacgagccggtacttttctgtctcatcgtcttcttcaaaatacagttccaccgtattgttgattccgacttcatcctcccgggacgtatccgagacgatcctggccgttttcagcattttctccagataccttatgcggctttcattcctgttcttgtcctgtttggctgccttatattcaaaattctcactcaggtctccctgggcccgcgcttccttcactgcctccagctcttttttgcgcacgaccagcttccggtactctatctcttccttgatcttctgcacatcacttttcgtcaactgttctctcacaaaatctcctgcctttcttactcgttcattttttattgtatcgccggagaacatgatttgtccagttcttttgtcagatatatgccatggcgcgcacaggcgccccgtcggcatattcatattttaagggaagggcaatgagatctgaaagcccgctcccaagctctttaagccggcagagattctctatgatcaccatctggtttgtcccaaggagcaccttatgcgccggcagttcccttgcctcagccgcgtcaatgctcatcgtatctatacctacaccttttttaccggccctggcgatatacttcgccgtatccacttcaagaccgggagaacgtctcatatactcttcctgtccccagaacttctcccagcctgtccgaaacagcagaaaatcagcggcgtccgccagttctctgaccggttctatgtatttacatgtaatatactctccctctttgatcccggtacagtcgatcaccacagccttgccgataaagtgggccgcgggaaactgctccagcgtcttcccttttgcaaataagtgcgccggcgcgtccatatgtgtccccatgtgcgacgtcagttcaagagccgtctctctgaaaccgtcttttccgtaactgcacagactgccgagcctcggctttggtgtcccaggccacaccgaaatatctttgtctattgtgtaggtaagatcgataatttccacagattatcccttcctttctacgtgacatatacccattgaacagcagaagttcaacaggtatattctaccagactattattaagattgcgggacataaatcttaaggatttattatttttcttctctctcaaattccagtatatctccgggctggcagtccagcacatcacagatggcttccagcgtcgagaatctgatcgcctttaccttaccggtcttcagatttgacaggttgacgttggaaatgccaaccttaactgacagttcattcaatgacatcttccggtctgccatcacccggtcaagccgcagtattattgccatttttacaccccttgctatataagcgtatcgatttttttctggtacgcagtgccataccggataatttcacttattttctttcatcctgtctccttcagccttacagcgtctcatccgaaaactgctgcagttcacagcctctgcggaatatatcgctgacaagcagcacgatcaccccggcaaatatccatgaaagctgcagatcgtccggtatcccgaaagaatacacgctgtgacacgcgagcagctgcaccatgatcttcaatataagtttgctgaacactcctatcaatatgagagtcctgcctgccttcttaatattactgacgacttccggcacgaatggagaatgtgaagtatcgatcgttctaagtatattccttatataattcagcacaaagaacatcggcgtaaaatcaacggccattgcagtgagtagaaatcctatggtaagtaccctgttgtctattatctgcgtcccggccggaagataatccgggccgatcctggaaattcccacaagcagatcaaacacccagtaaccacctttttccgtaattgcgacatccggctgcagtcccgcatagacaatgttgactacgcccgcgatcattctcacgatgtatatggctatcgcaaacttgagaaataattcacacgtatcataatgggtctgtcccgcctcatcgaggcagcctgtgatctctacacttcttttcctcttcatagctctccctcctgctcttaatatttatttctgttctttcttttatgtctagactatatcacactcattaatctttttcaactattatttaatgataatcattaattaattattattttatgataataaatcaaaaagtgagaatgtttttctaaaattaaattatttttttatttgtaacaaatgttacagaaatcattttcatttttatgtattctattaccagaaagaacataaactaaatgaaataaatcgaaggaggttctttacatgggaaatttttataaagaccaaaactcacaaaatatatttttagaacttatgacgctcgcagaacaaaataaagctcctcaacttgagaaactcaatgcgaatacgacagatgccgcgcaggaaaaacatgtgcctgtcatcactgtaaacggaaataaggtagaagtagctgtcggttctgtctctcacccgatgcaggaggagcattccatcactgtcatatttatcgagacaaagaaaggcggccaataccgcagactttccccgggcgaagagccgaaagctgtctttacgatcgaggacggggatgaatttatcgcagcatatgaatactgcaatctgcacggactgtggaaggcaggggcataacccttctttatacatgaatgataaacaagaaaaacggaggtaatgaaaatgaaaaaatatttatgtgaaccatgtggatatgtgtatgacccggaggttggcgacccggacggcgggatcgcgccgggcacagcctttgaagatattccggacgactgggtatgcccggtgtgcgggcttggaaaggatgtatttatcgtagaagaataaaccttacattccttctatctcatcctgaagacgacgaaaatctaaaatatggatatgatttcttcctgaaatactaagaattcctttatcctgcatccaggataattctcttgacagagacggccttgcggtatttaaatacgccgcaaggtcttctctgttcatgggaagtctgatgtctgcgtttcccgcgcttaactccgacaaataatacgcgatacgctgtctcagcgttccgcatgtgagaaggtggatctttttcgtttttttctccgcctcctcggcaaacagccgcatcatattaaagatgatcctgctgtggtgggcgcagttcttctcacatgtactgtaaaagaagtgtcttgatacggccagaacctctgtctcctgccttgcggcggcaaaatacgcgtagctctcatgctcgaggaataagtctacctcgccgaatccctgcccttctttcacaaaatctacatagttctgccttccaagcgcattgatctgcccaagctctacctcaccgtttagaataaagtacaaatgctccggcgtatcctcctgccggaacacgtactcatccttcccgtaagtttttacaaatgctctggaacaggtaagacttctctttatctcatcttccgtcaaaccttggaacagactcagtttctcaacgttcatagcttcatccctcttttatacatagacgatctccacgccgccaaagctcacttttcctttcagcttcacgaccggaccgccggaagaatcattcctgttcttctcatcgatccccccgaatgcggtactcgtcttgttgaccagcgaccagttcttcgggatatacagctccacgccggcaaaggaaacatccaggtcaagcacggcctctccatgctgtataacggcattgtcaaaatataccttcagggaaccaaacgcgcagtgcagccgtgcgctctggaaatcatcggagttcacatatttgatgctgccggaaaacgtcgtggaaaactccatctgcgctccgtccactgtctccaccgattcctcactgtctatgtgatggtgatgataacagcttcttctcggatggaataaaaagctgaacccgatgctcccaagaagcgccgctcccagcaccggccacggagtgatagactctatgccgagcggccgtgcataaatgatgcacaggaaggcgacggaaaacaatactcccgtgacgcttctgtgaacaacactttttatgagacacgctgcaaaaaacacagtgagcagaagactgaacacaccaatatctcccagcactcccatacggctcacgatcaggaataccgcgctcacgataaaaaataatccccagaatatccgttcttttttcatactatatctacctcttttcttctaatcggtcttttaatggcttgtagtaatatctggaaacatacgcctgcttgtgcgttccctgaaattctaccgtacaggaagcggggagtgactttgtcatggaatagatcttccgcgtgttcaggatcgcggatttggacactctcataaaaaagccgggcagcatctcttccagttcatacagccggtattttgtccggtatatttccttcctcgtatgcgcatacacttcattatcctccgtctcaaaaaacagaacttcctccagcggaagataataggaagtatctcctttgtagaacacaagcctctgctccatggatacgacatctgcaaccgctttctggatcttctgtacctcttcactcagcacgctgctgcggatgatgatctctgcttcttttaagttgtcttcaatctcgatccgtatcttcatctttccctctccctggtcctatataaccacaatgaggcaggaatgtaaacgatatttgggcaagtggtatttttttgcaggtaagtggtataaaagccccctcaacatatcacagccggatggacacaaatgttccgtcttctgcctccacatgcacgacttccagtcctctgttctccctcagcacatccgtacactcttccacgatcacgcatatattctcctttgtgataagacatgcgtaaggttcgggtacctctgcgcgcatcttctcaaaagcagaccggggcagcttttttataagaaaccctgccattctcagcgggaccggcatacggaagttcaagtctttcgtctttactattactttcatatatccgtcccctatttatctacgtatattcttactctcgtaccgtctgctgcctccacactgattaagtcgccctctatctcgccgtccaggcagtcggaaatggcatccatcatttcttccagattcacaccctgcagctccttctccggaataggaagtctccccgtaaccttgagtatctttttcacagccccgaccggaaactgaatgtttaccttgtctccgcttccgtccacgataatgcggaacatctttttgtcatagttcgttctggccggcggctctcctgcctcttccacacccattgcattcaggagttctgccgcctgttccgccgtgatcgtaccttcttctatcatctttaaaactctcaatctttcatccatatcgattctcctcttttctattgatctatttcagccggcggatcgcctcttccgccgtgatctgtcccagctcgagcgctttcagcacagcctcgcgcttctgcatctcctcatcttgtttcgcgtcttcctcatatccgagcttcctgatgataccgtcaagcttcgcccggacggtcggatacgagattccaagctccttttcaacctccttgatgtttcccctgcaccggataaaggtctcggtaaaatacaattcctctccggacagataatcaaacttactcaatgtaaagtcattttcaatcacggtatcacagtctgaacacttcagacgggtcactttcagttctccactgcagaccggacactggctgatcactttcttcatacgttcacttcctttctcatattaacaatataataccaatgtttgaaaatgtcaatatttatattaattattttaattacaatattgacatttttgagtttattgtttaatttaattcagatcagaaaaaaatatctaaataccgccgtcatcaccggctccatcctgcccttttctgtccagcttacggagaaaccagaccgcgagcggggcagatatgagaaatgccagaacatccgccactgtctgggctgtctgcactcctctcagaccgaatactgcaggaaggatcaatatgagcgggataaaacagatcccgctccgaagcgacgacaggaacgacgccttcccgctctctcccacgctctggaacatcatattggtgcataccgccgccggctggaaaaagcaggcggcacactggcagcgcagcgcaaagactccgatcctgacgacctccgggtcatcgcggaatacgccgatgacctgtgcagatacgagcagacacaccgccgccagactgccgatgaccgcttcgccggccgctgccgtaaaccagaagccttttttgactctgtcatacttttccgccccgtagttaaaagcagctacaggctgaaatccctgcccgagcccgagtcccacagagaagatgagcatacatatccggttgacgatgctcatggccgccactgccgcgtctccgtacaccgccgcctgatgattcaaaagcagcgtcgaaacacttccaagcccctggcggataagacttggaaaaccagtagtgacgatgcgcacaacgtcgcttacgtcctttgttataagccgcaccgaaagcttgctgtccgtttttccgctcagaaacatggccagaaggatcaggaaacttatcatctgagagagcgccgtagaaagccccgcgccggccactcccatatgaaggccgaacataagtaccgggtcgcccgccatattgaggatgccccccgttgtaagtccgatcatggcgtacgccgccctgccctcatatctgagaatattgttcagcacgcagcttcccgtcataaacgggcccgccagcaatatgtaaaacccgtattgctttgcatacggcagtatcgtctccgtgcttccaagcagacgcatgaactgtgtcagaaacgcaatacctgccacaccgatgaataccccggcagctatagccagaaaaaaactcgtcgaggcaaatctgctggcgctctccttgtctttctttccaagcttcctggatatgatactgcccgcgccatggccgaacataaagccaaacgcctgcagcacggccataagactgaatacaactcctacagctccgctcgcgctcgttccgagcctgctcacaaaatatgtatccgccgtattgtaaatactcgttatgagcatactgacgacagtcggaattccgagtcttatgatcagattcggtaccggcgtctttgtcatcttgttaaactggacattgtcctgcccttctcccatgtcaattcccccttctgctgtcataattggatagaaaaaacttcttcccatgcagttaagctgcacaggaagaagcattatacaattatcggctctgccgtctccaccaatgaatatttaattatattatacaccaaatgcacccggtatgcaccatcagaattctttctttttcataatgttcagcgatactttatacgatatcactgccatcacacagcagataacgagcgcggcggcaaaaagtcttcccggggcggccgcggacagccgcgccagtatgatatctacatcagcatttaaccacttggccgccttcattcccacgtaacagactaaaattaagattccgatcgcacttaccatcacaattcttcctttttctgccccaaatttaaactggatcggaaggacaatgagcaggaacagcaaaaataacagaaggtaggcccccgctgtgtccagccagctttgccactttacacccgggtctctcatcatcgcatatactgatatcacgatcgtggatacagtccacgccgttcctccaagcagaaacccgaatacatacttttccctcacatacttcttccgggtgaccggcagacagaacagaaatgcaagaccgttgtcgtactcatcgtagctgacagaactgagcgtaaacatggaaaacacgaaagtcatataacttataacataagaagggcttgcgcttgtcaccatcagcatgacccccaccagacagacaatgaagaagaagttcttctggcctttcaacagtttgaaatctttgatcagtaatcctttcattatgcttcacctcgaatcatcattgtaatcaccttgtcaatgcttcccttttcaatcacgatatcacggtaattttccatgtaaaactgcttatgcgcagtcagacagctaatgccgaagccttccttcttccgggccagtatatactccttgtctatcttatcgtactgctcttctgtcagcttcaatattccgtattgatccagaagtacatctgtatcttcatgaaatgtgatccttccgtccacgatcatgtacagatcatcacataatccttccaggtcactggatatatgggagctgataaggatcgaacggtctccctcttccatgtaaccacggagcagatccagcagttcatctcttgcgatcacatccagacctgctgtcggttcatcgagaataagaagacgtgcgccgtggcacattacgctgatcacctggagttttgctttcattcccgtagaaaactcctttaactttttgctgcggggtatattaaattcttcacacattctcaaaaaatgatctctgtcaaatctgcggtacagattgttaagtacagggatgatatcatttactgtcagataaccgctgaatccggaatccgaaagcacgactccgatctgctccctttcctccgtggaaagctgttctgcctgctttcccaacacaacggcgcttcccccgtctatgcctatcaggccaagtatagatttaaacgccgtactctttcccgcgccgttcggccctatgagcccggttacgcgtccttcctccacattcagtgaacagtcaagttcaaaacctttataatgcttttttacatgttccatttctaccagcataactactcctccaaaagaatatgaaataattgtgtgatttcttcattattcatcccgcagcttttcccttttcgtatggccgcttccatatcagcttctacttccctgcgcttctcctccatcataagctcctggtttgcgcaagtcacaaagcttccttttccgtggacggttacgacaaatccttcctgctccagggcatcataagctttttttacagtgagagcgctgactcttagctctttggacagcacccgcaccgacggcagcatctcttcttcttttaaggtgcctttcatgatcatcgtcctgatctgggtgacgatctgttcatatatcggctgcatggatgaattgttaatgatcagcttcatttcatccctccttgcttctgtaaacagtatataacagtgtcaaactgttgtcaactgttatatgctgtttatttaaaaatatttatttagctgccctcttttagaattacgccgcccataatcttaattgacaggtaagcaatggaacccgccggcaatactgctggttcaaatatcttttctggccgcaacacatatagttttactgttctgtgtatattccgcgccggctgcatctccgtaaaactgtaagctttgaaatcccgcctcccgtaattcttgttccaattcttcaatcacaaatgtatgctcccaattgttataacaagttacatccttatctgttataacaatatactggttaagaaacgtattatcatagtcataccggtaaagtgaatgcaagagcaggtaaggcttttcacgccaaaatcctccttcctcgcaattccaaatcttaaattctgtacgatgttcatactcataaggtgtaaatacatcaaatagaagacaaccgcccggcgccaacgcatcaaatatcttacgcaataaggctttgcgctctgcatgagataaaacgcccatatcgcagtagatcattgccgccagatcatattctccgccgatcgggcattgaatataatcaccctttttgtatgaaatattcaaccctctttctttcgctgttttctgagcatactgtattgaattttcagaaatgtccatgcctgtaacttgatacccctttgcatggaatagttctgcataaatgcccggaccgcagcccagatcaatgatccttttgtatctgcatattggcagtaaatttgagatccaatcgacagattgttttacgaaatcatgtttgcgtgttgctccctctagatcaggttccaaatgtgcttttaacatgctttgtgagatgtagggatcatcccagaatttcgttttactcttctcaaaaagagtaggtattcttaggtaaggtcttaataattgaagcattttattttttcctttctatcgtattttctacaacaaaaaaagctgcagaatatgtttcccacagctcagaggccagttactatggggaaaacaaaaataatcattttaagctataaaaacaagacctgaaccaaccgacaggctttctcgttcttataaagttaatgattatctgttttccacgtttcacttatattaccgattttataatatcaagtgcgccggatcaaaccaactccttttctgtcatctaaaaatattatacactgcctgtccatgtttttcaaacagtgaagcatttgatcacctggagcatgctggtttcccattgagcagagtcgtaccataagtatatcacagctgtctcttcaaaaaccctacagacatatgatgtgacccccaaaagttagacttttattgcgtaacagatttggacttatcaaggttttgtagacacaaagttatgtggattttatgaattttcggcttcaaattgcgcaggtgaaatatattcaagtgctgaatgcatccgcttagtattgtagtataattcaatatatttaaatatttctttttgagcttgttcaggagtttcgtagtaagaatcttgaataagctctctttttattgttcgataaaaagattccattaaagcattatcatatggatttctttttccactttcactatgaatcgctttgcgtgctttaagcagcatctggaagttagaacttgtaaattgtgctccttggtcagtatgtataattaa

SEQ ID NO: 429 - DNA, 20908 bp, Extibacter hylemonae
  source 1..20908: mol_type = genomic DNA
tcacttttaagctttatctatcagtcctcttgtagtataatatttatatgagtaaactaaatcaattaacttaaataagtttattcctacaagaaacaaggggacgttatttcaaaaaaagaaagtggggttaatatgagctggaaaaagaaactcgctgcaggaacagctttaaccggggctgctgctgttacaatacacatgataaataagtttatttacttttctgctacattagatgatttattaagtaatccatctggttcttattatgaatggagattcggtaaaatatattatacaaaaaaaggagaaggtaagccgttactcctaattcatgatttaactacatacagttctgcatacgagtggaacaagaccgtcgatgaattatcaaaaaaatatactgtttttagtattgatctgcttggctgcggacgttcagataaacctaatttaacatataccaattatatgtatgtccagttaattactgattttattaaacatgtaattggtgataagacagatgtaatagcgacaggagagtcaggctcgtttgttttggctgcttgtcagaatgatagttcaataattgatcagatagtgctggtcaatcctgcaagtatagagcttcttggtaaaatacctacaaaaagaagtaaatgtttgagctggtttataaatactcctatcctgggtacatttgtttataatatgctcaccaaacgtaaggatattgaagccctgttccaaatggattactttgatgattctgacaacgttgacgatgatattatacgcacttactatgagtctgctcattcgggaaatgcatcatcaaaatttttatttgcaagcattatgggatattacactacaataaatatacctcattgtctggagtctttatctaacagtatatatatagttgcgggaaagtctaatcaagataatattgattttgcaaatgactataaagatatacttccttctattgaaattgttgaaatggataatactaaatatcttcctcaactggagaaaccagctgaatttcttgaacagttaaatatactgttatcatcggaagaataaataaaaagtataaaacaaaaaaacagcctgtggataagttattcatattcacaggctgttttttatgactgatcattttaatggttcttttgacggaagtcccgcttttctcggatatcttttagctgtctgcctttctttttcaataataacaaatgaccttcctatatctgttccaggcagttgaaacttcactgtatctttaatacgaccgcccaataatgatgccgcatttctggaatcttccttttcgctttctacatccccggatttatatgatataaatataccccctatccgtatatacggtatacaatattcagacaaagtggacaggttggcaacggcccgtgaaacacataaatcatacatttctctgtattctttctgctttgcgtaatcttccgcccggccatgtattgttctgatatctttaagtcctgtacgatcaattaccgtatctaaaaaccggattcttttattcagggaatccagtaacgttatattcagatgaggaaatgcaatcttcaacggtatgccgggaaatccggctccggtacctatgtcaatgacactgtggattttatctatttctatagctttcacaagagaaagactgtccacaaaatgtttttctaccacttcctcatactctgtgatccctgtcagattcattactttattccactctataagcagatcataaaactgttcaaattgttcttcctgcctgtcattaatagagatattcagttcctgaagtttcgtttttaatattttactcatctataaacccctatgcattaagataaactaataatacggatatatcagcaggagacacacccgaaatacgagacgcctggcctatagatacaggcctgtactcttttaacttttgaactgcctctatgcggagactttttatatcatcgtagtcaatattttcaggtatctttcttttttccagctttttaaactgctctacctgtttttcctgtcgtttgatataaccgtcatatttgatagaaatatttacctgctctataatttcttcttccagtccttccggaaatacaggacgttttttgtcaattggacgcaacgcttcataagacagctccggacggcgtatgagttctgcaagagtggttcctgaatttaaaggtgtactgtcatactctctaagtatatcctgtacctgttcatttgccccgacatttacatgattcacacgctctatctcttctgtgatccacttttctttcataagaaaatgttcataacgttctttttctataagtccggcctcatatccgagctttgtaagccgcctgtcggcattatcctgccgcagaagcagccggtattccgcgcgtgatgtcatcattctgtatggctcccggctttcctttgtcacaagatcatcaataagaacgccaatgtaagcctgtgaacggtctatgaccagcggttcttttccctgcagcatcctggccgcatttatgccggctacaaggccctgcgccgccgcctcttcatagccggaacttccattaaactggccgccgctgaacagacctttaatgtttctgaactctaatgaaggtttcaactgtctcgcatctatgcagtcgtattcaattgcatatgcatttctgacgatcttaacattttcaagtccaggtacggtacgatacattgcatattgaacatcctccggcagagaactggacattcctccgatatacatttcatttgtctcaagcccttccggttctataaacacctgatgcctgtccttatccgcaaacttgactactttatcctcaatggacggacaatatctcggcccggttccttctatcattcctgaatagagaggtgacctgtcaagattcgcccggataatatcatgcgttttcttatttgtataagtgagccagcacgatacctgatctatctgtatgtcctccggatctgtcgtaaatgaaaatggcacgaccctttcatcgccaaactgttcttccattttactgaagtcaactgtatttttgtcaattctggcgggagtaccggttttaaaccgatacatcctgataccaagttcttttagacattccgttaagtaattagccgcctggagaccattcggacctgtattctgacttatatcgccatatatacaacgcgacttcagatatgtccccgtacagagaatgacagctctacagcgatagacagcgcctgaataggtctgcactccaatcactttattatcttctgtcaatatattcacaacttccgcctgtttaatctccaggcggtcctgattttccagtacctggcgcatcgttctgctgtaatgaagcttatctgcctgtgcgcggagagaatggacggcaggacctttcgacttattcagcatttttgactgtataaaggttttgtcgatgactttccccatctcaccgccaagcgcgtcaatctctctcactagatggccctttgagcttcctccgatatttggattgcacggcatcaacgctatactgtctacacttaccgtaaatactatagtgcaaaagccaagtctggcggcagcaagagccgcctcacagcccgcatgtcccgcaccgacaacaactacatcgtattcatcattattttcccatacagaatttgctgaatatttcatttatcaaatcttctcccatcgtatctccggtaatatcaccaagcgatttatatgcatctaacaagtcaattgaataaaaatcttccggcattcccatatcaatactatctatcactttctgtaaagaaccgccggcatcctgtaatgctgccttatgtctgacatttgtaatatagatttcatcattaaatgaaagatttccttcaaaaaacatattttttacagcttcttcaaagtctgcaattccgttctgattctttgcagacacttctattacttgtatttctttgcttttacttatattattatttgcaggattacttgcattataaacatcttttattttttccttcgttattatcatatctaaatccgtcttatttagcaatataatagctggttttccatatatcattttcaaaatctgtctgtcattttcatcaagcggcgcagacgcatcaattacatataaaatcagatccgcctcatctgcatacattttcgctttatctaccccgatcttttctacaatatcatctgtctctcttatgcccgctgtatctattatattaagtgaaataccttgaaggttgatatgctcttccagtatatcacgggttgtcccggccacctccgttacgatagctctttcctcaccgaccagaacatttaaaagagaagactttcctgcatttggcctgcctacaataactgtttttatgccttccttaatgatccttccgttatcgcatgtagaaagcagtttatttatttctaataataactcatttacagcagatcttaattcttccccgtatccatcaacgctgatatgctctggatcatccagcgctgtctctataaatgcagtgtggtatattattttatttcttatatcatttatttttgactttacatttccttttaactgactcactgaactttttaacgcatactcattttgtgaagcgatcagatcgccgacagcttcagcctgtgataaatcaagcctgccatttaaaaaagcacgtttcgtaaattctccgggctctgccggcctggccccatttttgatcataagctcaagaacacgtctgacaagatatacgcctccgtggcagtttacttccaccgtatcttccccggtataactgtgaggacctctcataagcatgacaagcacctcgtcgatcgtctcttctccatccttaatataaccgtaatgtattgtatgagacttctgagcagcgagcttcttaccgttctttccttcatatatcctgtctgcgatcataaaagcttcctcaccgctcatgcgtacaatgcctatccccgaatcagacatagctgtagaaatcgctgcaatagtttgagttttcacaacaattacctccgttttcataggggtcagacccctttggcgttaggggtctgacccctatgaaaatatacaaaaaataggggcaatttcaacccctattttttctttttatttatttacgtactaatgtcacaactactcttctgtaaggttcttcaccttcactatgtgtggatactgctggatctgcctgtaaagctgagtggatgatccttctttcatacggattcatcggctcaagagaaacagttcttctcgttctctttactttacttgctatattttttgcaagattttcaagtgtttcttttcttctgcgtctgtaatcttccgtatcaagctttactcttacatagccgtcctgcatcttattggcaactctgtttgtgagatattgaagggaatccagcgtctgtcctcgttttcctatgagtatacccatattttttccttccatatctatactcagcgcgccttcttcatctacttcagatgttacttttaccccttccatgctcatggcctgaagtacgtcataaatgaatttctcacatgccgcaatggtctctggctcaacatttgcaagatctgtttcttttttctccgcagctgttttttcttcttttacttttacaggagtattttcttttttaaattctttctttgctgccggtttttctttctttaccggttctgcacgttttacttctttaaaagactcttccttagcaggctcttcttttacgggttgtattatcttcttgcgggctttgattactgcctgtttcattccaataccgaggaatcctgcgcttcctttttcaattacctcataatccaactgatcacttgttacgcctaactggattaaagcttcagtaattgcatcatccagtgtctttgccgatacagtaataaattccataacccttgccccctaatcgtttttattaaactttttcaccatgtttgcctttgatgccagacttccttccttagcatttccggcattgtcacgtgccttcgttactttttcttctctttctttttctgtgagacctgaagtaccgcggtttgcagaatctttaagagttctcgtatttgtctgtgccatcatatttattttttcagctttctcgcctcttttctggcgtttttcagctgctttttctttgttcttttcaataatatcttctacagatgtcttgcttaaatgcttattgataagtacctgctgtacacaacgtacgaccgcacttacgatccagtaaagaccgatacctgaggataaggtaaataccatgaacactgagaatatcggcattgtcatattcatagtcttcattgttccggccatcggattatccttgtccatctgctgtccggatatattctgagaaagtttgatactcagatactgtgtaagacctgacagaacagggagcagtattgctgttatgataacaactgcaggcgctataccgaaagatccgctttcttttatcatctggataggcgccatggtaagatccggtatggtgatgaacttattaacagaagtcgccgcaccttttattgcaggcacatatctctgcatatcatagataaccgggtataaggcaaacagcagaggcatctgtattaataaaggaagacatccgcctgtcatagatgttccatatttatcatatacctgctgaacttcttcctgctgcttcatcattgaagcctggtcctttttatttttatacttcttctgaatcgcctgaatctcaggattcattacagaggacatctttgccgtcttctgctgcttgacagtaagcggaagcataattgtatatacgattattgtataaaatataattgataaaccaataaggccattgtctgatggcaatatgttatctaacactgtgtagataaagttcattactttaccgagtaaccacgcaatctgtcctacgatcggccagtttgcagcagttaataaagtagctgctgtcatttttcttcctccattgtaaatacaattaatataaattatcagggtacggggtcatatccaccctttgcaaatgggttacaacgcaatattctccatatggccagacgacttcccttccatgctccgtacttttctatcgcctccaccgcatattgtgaacatgtggggtaatagatacatgtagaatatcttttaagaccagacagatactttctatagaatctaatacatcctaacagaatttttttcataatacgtcactccattaacgggaatcatttccctcatctataatttcatgaagatgtccaagatggagcaatgcgcttacgatttctttataattctttcctttagcgcctattcttgctatcacaattatatccaatccacatctgaacctgtcttcttgtagtcggtaactttctctgatcagtcttgttaaccggtgccgtactacactgtttcctacctttttacttacagaaatccccaatctgttgcgctctgtatgattttccatcacatacatgacaagatacttgttagcataagaaatacccttattatagacggtctgaaaatccttgtttttctttaaagattcggaaaatttcatatagtgaatctcctaatttttagagaagaaaaggccacatatatgcggcctacgctgataatctctttcttccctttgctcttctgcttgcaagcacttttcttccacctgctgtgctcattcttgatctaaaaccatgaactttagctctctgtctcttttttggctggaatgtcattttcattgatatccacctccttatattttacaagggatatactcccacatatttctaaagacatcagttaagattatattaaaaaaaagcctgtacgtcaagcaaaagctgggattttgtcattttttttaattgtttaattggggacgggggaattttaaaaaatccccgtccccaatatttttccaaattatccacattttgtggataacctgtggattttaagtggatatgatgtggatatgcagttttttttctctttttgttcactgtatgcgctatattttgcttatgataaagttatccacaggaataatcgttgcttaaatagctattttgatgtaaaatgtaaagagcgggtttatgcttaaaacccttttaaatggaaagattaggagtttatcgcaatgaacattgttaaggaaaaatggcaggagattattgagcatctgagaattgaacatgagttatccaatgtatctttctctacatggatccagcctttaaaggtatatgacgtcattgacagcactgtatttatacttgtcaatatgaatgcaagcgtcgaatatattgagaaaaagtatcttcttccgctcaaggtctgtatcgcagagatcacgggcacggaatatgagatcgtctttttatcggaagatgatgacaggatcgacgaaatacagaatatggcgatcgaggcgagccagaagaagaaaacgaaatccgctgccgaaaaagccggtcttaatccgaagtatacgtttgatacgttcgttgttggaggaaataataactttgctcatgcagcgtcactggcggtggccgaatctccgggtgaagtatataatccgttgtttctttacggaggtgtcggacttggcaagacccaccttatgcattctattgcgcattttatattggagaaaagtccgaagaaaaaagtcttatacgtaacgagtgaaacttttacaaatgaattgatcgatgcattgaagaacggtaaaacggccggtaatgaatctgccatgtccaaattccgggacaagtacagaaataatgatgttctgctcatcgacgacatacaatttataataggaaaagaaagtacacaggaagaattcttccatacattcaatcatctccatacatccggaaagcagatcatcatatcaagtgataaaccgcccaaggatattgaaacattggaggcgcggctgcgcacacggtttgaatgggggctcatcgcggatatatcagctccgaattatgagacaagaatggcgatcctccagaaaaagatcgaactggacaaactggaaaaatataatattccccaggatgtgatcgaatatatcgctacaaatatcaagactaacatccgggaacttgaaggttcactcaacaagctgatcgctctgtacaagctgaacaacaacgccacacagatcgatatcacacttgcttctgaagcgctgaaagatatcatatcttccaagaataacagagaagtgacacctgagcttatactggatatcgtttctgaacatttcggcgtatcgatcgctgatctgaaaagcaataaaagaaatgcagatatttccaatccgagacagatcgcaatgtatctcatccgttccatgacagatacgccgcttaaatcaatcggcatctttctcggcgggaaagaccattctacagtaaagcacggagttgacaagataacaaaagaagtcacaacagatgaaacattatccaacacagtaagtatcataaagaagaaaattaatccggcataatgttaataaaattgtggacaacctatggatatctcctattacagaaataaaatagtgaattacgaaaaagttatccaaaccacatccacatataaacctgtcacattccacacagttttaaaatgccggaacattgacagccagagggcttaaaggggttttcctcttttccacagcccctaataagaagaagacggaaatcttttatatatttatatatttgcgccgcaggaaaggagttatacacatgaagatcatatgcagtaaatcaaatcttgtaaaaggagtcagcatcgtttcaaaagctgtcccttctaaaacaacaatgcccatacttgaatgtattcttattgatgccactgccgatattataaagctgacagcgaacgatatggaacttggcatacagacagagatagagggagagatcacagagcggggaatgatcgccattgacgcaagaatcttttctgagatcgtaagaaagcttccggacagtgacattgtgatcgaaacagatgcaaatcttcagacagtgatcacgtgtgaaaaagcaaagttcgatctgtcaggaaagcctggcgaagaattttcatatctgccgatcatagagaaagaagagtccatagaaatatcacagtttactttgaaagaagttatcagacagactatcttttctattgctgatacggaaagcaataaattgatgacaggtgaactctttgagatcaaagacaacatactgagagtcgtttcacttgacggacacagaatatcaatacgtaagatcgaactgaaaaatgaagttgccgacaagaagctggtcgttcccggaaagacactcacagaagtgagtaagatactgtccggcgaggcggagagcatggtaaatatctcctatacgaacaatcacattgtatttgaatttgacaatacgatcgtcgtatcaagactcatagaaggcgagtatttcaaaatagaccagatgttgtcaagtgattacgagaccaaggttagaatcaacaaaaaagagctgctcaactgtatagacagagcgactcttctcgtaaaagaaggtgacaaaaagcctatcatcatcaacataggtgacgaaataatggaacttaagataaaatcacagattggttccatgaatgaagagatcatgatcgaaaaagagggaaaggatcttctgatcggctttaacccgaagtttctcatagacgcgctccgtgtcattgacgacgaagaggcgacactttacctgatgaatgcaaaggctccgtgcttcataaaagatgacgcggagagttatatctatctcattcttccggtaaactttaatgcagcataataaaaatgcacatatgagcaggtaaggaaaataaaatgcagaatataaaattaagagaagaattcatcaagctcggccaggcgctgaaggccgccggtttggtggattccggcgtagaggccaaagaagtcattcaggacggccttgtcaaggtgaatggagagacagatacccgccgcggaagaaagcttcatgcaggagatgtggtatcttttggtggggaagaaataaaaattgaagattaaatctttgaaattaaagagttttagaaattatgattttttaaaactggagtttgatgacgccacaaatatcttttatggggacaacgcacagggaaaaacaaatatcctggaatctgtatatctttccggcacaacaaaatcccacaggggaacaaaggacagagatctagttcagtttgggaaagaagagtcacatatagagactgttgtggaaaaaaacggcatcacatatcagatagatatgcatcttaagaaaaacagtccgaaggggatagccataaacaagatacccatacgcaaagcaagtgaactgtttggaataatcaatattgtatttttttctcctgaagatctgaatatcataaaaaacggaccgtcggagagaagaagatttatagatcttgaattatcacagctagataaggtatatcttaataatttatctaattataatcgtatcgtaaatcagagaaatcatttattaaaagatatcacccagcagagaaatctaatggagacactggatgtatgggaaatccaattgatccagtacggtaataaaattattgagagaagaaaacagtttgtgaaagagataaacaaaataatttctaatatacacaaaaaattaactggtgaaaaagaagaaataaatttgatctatgaaccaagcatcggaaatcttacgtttgagcaggctctggccaaaaacagagaacgggatatgagaataaagagcacttcagtgggtccccacagagacgatatatgctttatggtcggggaccttgatatacgcaggttcggatcccagggacagcagaggactgctgcgctgtctctcaaactttcagagatagaactggtcaagcagtcaattcacgatacaccggtcctgttacttgacgatgtattgtctgaacttgacaaacacaggcaaaactatttattagatagtattcatgatatacagaccttgatcacctgtacaggcgtggatgagtttgtgaatcatcgtttttctataaacaaagtatttcatgtccaggacggacaagtagcaaaagagaactaggaggattagaatgagtacagaaaaggtgcagcacgaatatggcgcggacgagattcagatattagaaggtctggaagctgtcagaaaacgaccgggtatgtatatcggaagtacatcggcacgcggtcttcaccatctcgtttacgagatcgtggacaatgcggtcgatgaagctctggcaggattctgcgacactatatacgtgacgataaatcaagataattctgtaacggttgtggataacggccgcggtatccctgtgggaattaacagtaaggccggactccccgctgttgaagtagttttcacgatactgcacgcaggcggtaaatttggcggcggaggatacaaagtatccggcggtcttcacggcgtaggcgcttcagtcgtaaatgctctgtctaactggctggaagttgagatctacagtgaaggaaaagtttatatgcagcgttatgaacgcggtaaagtggcaaaaaagctggcggtgatcggggaatgcggctcagacaagaccggtacgaaggtaacatttcttccggacgacacgatctttgaggagactgtctttgagtatgatgtgctgaagcagcgtttcagggaaatggccttcctcacaaaaggccttaaaattgtcctgcgagacgacaggccggaggatgagccggtagagaaggtatttcattatgagggcggcatcaaacagtttgtagaatatctgaaccgcagcaaaacgcctctttatgagagcattatctactgtgaagggctcgtaaataacgtggctgttgaagtggcgatgcagcacaatgattcctacagcgacaacacatatggctttgtcaataatatcacgactccggaaggcggcacgcatatcgtcggtttccgtaatgcgctgacaaagacatttaacgactatgccagaaagaataaactgctcaaagacagtgaaccgaatttatccggcgaggatataagagaaggtctcactgccatcatcagtgtaaaaatagaagatcctcagttcgaggggcagacgaaacagaagcttggtaacagcgaagcgcgcggggctgtagacagcgtagtgagcagccagctggagatattcctggagcagaatccgtctgtggcaaagatgacggttgaaaaatcagtcatggcgcagcgggcaagggaagccgcgagaaaagcgagggaccttacaagaagaaaatccgccctggacagcatgtcacttccaggaaagcttgcagactgttctgataaagatccgaaaaactgcgagatctatatcgtagagggtgattcagccggcggttctgccaagactgcccgtgacagaggcacacaggccatacttcctctgcgcggcaagatactgaacgtagagaaggcaaggcttgataagatctatgcaaacgcagagatcaaagcgatgatcacggcgtttggaacaggtatacacgacgattttgatatatcaaaattacgttatcataaaatcatcattatgacagatgccgacgtcgacggcgcgcatatcagtacgttattgttaacattcctgtaccgttttatgcctgacctgatcaaagaaggttatgtctatcttgcacagccgccgctctacaagttggagaagaataagaaagtctggtatgcttacagcgatgaagagctggatacgatactgcgggaagtaggccgtgacggaagcaacaagatacagcgctataaaggtcttggagagatggatgccgggcagctctgggagacgaccatggatccggaacaccgcatactgcttcgtgtgacgatggatgacgagactacgtccgaactcgaccttacatttacgacacttatgggtgataaggtagaaccgagacgtgagttcatagaagaaaatgcaaaatacgtacagaatctggatgtgtaggaggtaaacaatggaagataatatttttgacaaggtccatgaagtggatctgaaaaagacaatggagacctcctatatcgactatgccatgagcgttatcgcttcacgcgcactgcccgatgtaagagacggactgaagccggtacagagaagaatactgtattccatgatcgaattgaataacggaccggacaaaccacacagaaaatgcgcccgtatcgtcggtgatacgatgggtaaatatcatccgcacggtgacagttccatctacggagcgcttgtcaatatggcacaggaatggtctacaagatatccactcgtggacggacacggcaacttcggttccgtggacggcgacggcgcggccgccatgcgttacacagaggcacggctcagcaagatatctatggaactgacggcggatatcaacaaagatacggttgatttcataccgaactttgacgagacagaaaaagaaccagtcgtactgccggcaagatttccgaatctgctcgtaaacggtacatccggcatcgcggtcggaatggcgacaaatataccgccccacaacctggctgaagttatcaacgcggtcgtaaagatcatcgacgaccagatcgaagaaaatgaagagacgacgatcgaagatatactgaagatcataaaaggacctgactttcctaccggcggaatgatactcggcacaagaggcattgaggaagcataccgcaccggccggggaaaagtccgtgtccgcgcggtgacagacatagagacgatgccgaacgggaagagccgcatcatcgtgtcagagcttccgtacatggtcaataaagcccgtctgatcgaaaagatagcagagcttgtgcgtgacaagaagatcgacggcatcacagatctgagcgatcagtcaaacagagaaggaatgcgtgtctgtatagaactcaggcgggatgccaatgccaacgtaatattaaatcagctgtataagcatacacagctgcaggatacgttcggcgtcatcatgctctctctcatcaacaatgagccaagagtcatgaatcttctcgatatgctgaactattacctggaacaccaggaagaagtcgtgacgcggcgcacgaagtatgagcttaacaaggcagaagagcgggcccacattttagaggggttactcatagcgctcgacaatatcgacgaggtgatccgcatcatcagaggttcggataatgtgcaggccgcaaaggctgaattgatggagcgattcggcttgtcggacgtacagtcgcaggctatcgtagacatgcgtctgcgcgcgcttaccggactggagcgggagaagcttgaaaatgaatataaagagctcatggaaaagatcggagaattgaaggcgatcctagccgacagaaaactgcttctcggcgtgataaaagaagagatcatcattatcagggataaatacggtgatgagagaaggacgtccatcggatttgatgagtttgacatctcaatggaagatttgatcccgagacaggatgtagtcattacaatgacaaagctcggttatatcaagcgcatgtcaaacgatacattcaaagcacagcaccggggcggcaaaggcatcaaaggaatgcagacgctggaagaggactatgtagaagaactctttatgacaaacactcatcactacattatgttctttacaaatacaggccgcgtataccgcctgaaagcatatgagatcccagaggcaagcaggacgtcgagagggaccgccatcatcaatctgctgcagctgatgcctgaagagaagataacggcagtcattccgatcgaagagtataaagaaggcgaatatctctttatgtccacaaagaagggacttgtgaagaagactccgatcacggactacgccaatgtgcgaaagaccggtcttgcggcgatcacactccgggaagaggatgaactgatagaagtcaagtatacgaacaatgaacgggacattatccttatcaccaaatacggccagtgtatccggtttaatgaaagagacgtacgttccacaggaaggacatccatgggagtgcgcgggatgaacctggcagaccgtgatgaagtcatcggcatgcagctcgattctcagggaacacatctgctcatcgtatcggaaaaaggtatggggaaacgtaccgggatggatgagttcacaagccagaacagaggcggcaaaggtgtaaaatgttataaaattacagaaaagacaggaaatgttgtcggagtaaaggccgttgatctcgatgatgagatcatgatcatcaatacaggcggcattatcatccgtatgaaatgtgataatatatcttctcttggccgtgtgacgtccggcgttaagctgatcaatcttccggacggagagacagttgccagtatcgcaaaagtgagaaaaggcgacgatgaggatgaagaagaagatacagaagaagtacaggcagaaaatacttcagaagaataaagacaaacattgaacagtaaaaaggtgagacccgtacagtggatctcacctttttttatttcaatattatttgaatacttttgaatgaatttatggagttaatttacctcagcccgttttacagtaatataacttgcagccgataaaagtccgaataagactgcaaaaaacagaaaaataagcagcatgttctgagaacttattcccatcacagttaagagaaaccgtacaaatgtgttccctatggatggaaatatgctgatgagaacaggaagtataacaaagaggaagaccggcagacagatcgcaaaaggtgtcttaagctgttttggaagccggtagaatatacctgccagcagataaccgaccataaacaggcatgctgtcataactgccgtgagcataatatttaagatgaatcccattcctccgtccagcttttcatgaagggaaggaaaaatcatctttatcgaagtcttcacaataatatttctgtgcgataaaaacgtaagttcaataagctttgacattaatccttctgctattgcaaagacgatacttaagatacttatcgtacacagactgctcttaaaatagatctttctggtgaagccgttctgaataagcatccagaaatgttcctgaaacatgaccattcctgttataaggcagacaaaagcgccgctcagccctatagatacagatccgctgctgaaattcacttttacggtattaagtcctatggaacctatggcataaaggaagaccaggatggcaaaatagacgataaatacaattcttaaatctgataactgatatttcaatgcttttttcattttgatttcctcctattctccagtaagctgaataaataatttctgcagatccatagccgaaagttccagcccgtccggaagcacatcatccggctttccgagaagataagcagttttaaggccgccgataacatcttcccctatcatttcccggcctgatacataagaatctaccagagatgcacggcctgagatacagtatccgttgttaagaatagcatctcttgattcatttctgataatttttccattcttgataatgatgacctgctctacaatattggtgacttcttcaataagatgtgtggagataacggcagtaaaaggatactctgcatatttttcgatcagaagtctgtaaaacaaatctctgtgataagcgtccagtccaagtacaggctcatctaaaaatacataaggcacattgacagaaagagccatgatatttttaaagatcgactgatatcctgtggataagttttttattttcttctttaaagaaagttcaaatacatcgcacagtttccgggcatagtccatatcaaagtccggataaaatttctgggcccagaagaaagcatcttttaccttcattccttccggatagagattattttcatttacaagaaagaattgagagagtatctcctcgttttcctccatacggtttccattcagtacaacagtacctttgtccgcaaatatccggttattgataatattgagcagcgtggactttcccgcgccgtttctgccgagaagaccgtagatcttcccttcttccagacagagatccacatctgtcaaagcttttgtatccttgaaacttttggaaatatcttttatctcgatcccgttcattttacatatcccctttctatcatggcaataatgtcgtcacttgtgatgccaagtctcctggcttcttctatcatcttacagatatagctgtcgtaaaactgactctgccttttgtcttttaatttctgtacggctccttttgatacaaacattcctacaccccgctttttaaataagatcgattcgtctactaataagttgattcctttcagcgccgtcgccggattaattttataattaacggaaaattctgttatagaaggaatctgctcttcttcccgaaaagcgcctgtcagtataccatcttcaatagtttccgagatctggataaaaataggcttttcctggtccagttcttgtttcatagtgtacctcctaacttatttagttagttacttgactaattaactatatatgtattaaatcatagatcaaatatattgtcaattattattttctttattgaaatatctttttgaagaattgtgtttaaagagtaatataataatgatataatttatcatatcaataattacgtaatataaaaaatataagaaaattatgataagaaaaggatgcatataaaatgtataaagtcataattgcggatgatgaagaaaaaatctgtgttttattaaacagcagtattctgtgggaggagcttgaactggaactttgctgtatctgccacgatggtcttgaattaaaagaggcagtggaacgaaagaagccggatatacttataacagatatctgtatgcccggaatgaatgccattgaactcataaaagatatgagggaaaaagacaacgatgctaagattctcatagtaagcggataccggcagtttgagtacgcgagagaagcattaaaatatggtgtggacaattatctgctcaagccgatagatgaagaagaactcaatgacgcgctgaaaaagatctgtctggagatcagtgtagaaaaaaatgaaatattgtcagatgatgccgaaaaaattaaagatactcttcagagcttttttcttcaggatataagaaataacagtgagatcggcagacatttgaatctttccgatatcaaccagaagtattacgcagactttaaagaggggtatttccgcgtcatatacgtgaagatcgatgtagacgggaaagcagatgaaaaattcaatcttcagatcatacagaaaaagatacgtgaaaaatgtatgagctctatcagcagaatacacaatgacacgatcgtttcttttgtgcagggaggatgcatatttacagtaaattatgatccggaagcggatccatccatccgtcagcttgccaaaaacatactggaggatgccagacaggcagtctccctgttcagcggattaaatgcgaccgtcggtgtgggaaacgcctgcagcagcgtacaaaacgtgcggcagtcctgtgaatcagctgttgacgcggtgatatacagaataatctccggtacaaataaggtgtatttttcggaagatatggagcttcaatacagagacagctatctcggagaagatgacaagagaagtctgatccgtatctttgaactgtccaacagggaactgttcagacagaagcttgaggatattgtgagagcggagagaaaaaatgtactggttctttacaagattcttgaggagtgtgtacagcttttttatgatacgctgaatagaaacaggatggaaggttccgacaatattattgtcggcaaagagatcttatatgagatggataatacgctgactgtgatggatctcgtctctgttgtggaagaaaatatctgcggcctgatgaagcggatgctggatgaaagaaagcagaaaggatataagccgatccgtgaggccaaagaatatgtaaagaaaaattacgcctcaaagataaaactggaagatgtagccggcgaggtatctctgagtcctgcttacttttcttctgtgttcagcaaggaggaagggatgactttcgtagactgggtcaacgaataccggattgaaatggcaaaagaacttctgagaaaaggagatcacacagtcgcggagacttgtgagatggtcggcatcagtaaccagagatacttcagtaaactctttaaaagcaaggtcggcgttaaaccgatggaatacagaaaactttacaattagggagacgttatttccgggagcagagatttgaagataattaaagagatgaacaatttaaaaattctccacattgcaggtatattgagcgccggcatgctgtttctggaagccgcgttcaaagaaaatgcggat

SEQ ID NO: 430 - DNA, 20698 bp, Extibacter hylemonae
  source 1..20698: mol_type = genomic DNA
cgccctttttgcacccctgcacacccggactcttcaccgtacacccccaatccccccaacttctacaactccatcctactccatatcatagagcctggccgcattgtggtacatgatgccttcaatctcttcttctgtgagcagcggccatccgcatcgtctgtttatctcattgaatccgctgcgtactttgtcgatatgtccccggatctccacggaagggtctgcggagaacgggtaattgtccggcgccacaaagtctgtggcaaacatgatcttgttaagtaccccgtattcccttgcctgcacgaggttccaggcgatcgtcatctcccggtcatacgccatggacaggtccgtgtacattctgtctgaattggccatcagtatgaacagttcttctgtgtgaggatagcccatatgttcaactacgatcttcattttcgggaagtccatcatcacatcgttcagatgctccggcctgtaatatttcatgggcgcaaaatagggcgggcattcgctcattgcagagtgatggtactgtacgacaattccgtgcttctgcgccagctggtagaacggatagactgttttgtcgttggcattgtaatgaccgcacggaggggtgaaaagcactccccgtattctgttgttcaggacatcttcctcaaacttgtcaaaagcagcctggttaaatctgtttattttgtcgatcggttccacacttgcaaacggaatgataaaatccggatatttctcgtaagcttcctgtatgtagttttccgccatgtcggtattccagatacggtacatggcctgtcccatggcaacgatcttctcgatccccattcccttccacatctttaccagctcatccagatccatgttctctggaattctccagttatccagccactggtatctttctttgtcaaagttctcttttctgattaaatgcatatgcgcatcaatgatcatcccgcgcgcctcctttattctgcctgtatcactcgttaaaaattgtagtcgtccacagtgtctttatcgaattccagcactgcgttgaatgtaatattggttccttctacagaagattccggatatccttcaacagtatctccctctttgtattcttttccgtccgccagacagctgtatacgatgttgactgcttcttttccgagcgtcataacatcccacaggcagcccactacttccagcccgtctttcttcatatattccttgatattgttcggctgctctgcgccgtatacaataacttcatttcttccggatgcgtctaccgcctgcgctgctccgagaagccccggtgtcgcgatgactgcgatcaggtccagatccgggttggccgtcagcagatcctgacagagcgcgtaagccttctgctggtctccgccgtgataaacggtcggcatcacttttatgtcgggatattcgttcttcagtacgtcctgaagcgcctcttccttcagagtcagagatgtagcggtcatatttccgttgacaacgccgatcttccctttccccttcagcatttcaccgactgtcttgcccatctgctctccgtatatcttatcgctgcacatattgataaaatattcccgcgcggattcatccaccacatcatcatcccatgtgtatacgtggatgcctgcatccatagcctctttcagcaccgggacgagcgcttccccgtctgccgggcatatgagcagcgcgtcggtgtctcctccgctgatcaagtcctgcacaaggttcacctgttttgaagcgtcaagctccgaaggcccgatgtagtccagtgtaatgccaagttcgtctgcctgctctttggctgagttgtaataggactcaaagattggcatccccatgaccttcggcatcattactactttcaggtcgtctccgtttttctttgattcggaagacgaagttttatcctcttttttctccgccccgcctcttgtacatccggcaagtccaaatacaagaacgaatgccagaatgaccgctgtcaactgttttccttttttcatagttttcctccttacattgaataagttattatttattttgaccgcttatcatccgtctctccttcagctttccggaaaactgccggatcaacaggacggcaagcagaacaatccctatgagcatctgccgtttcagagatgatattttgttcaggttaagcccgtttcctaatatggcgaagatcagcactccgatgatcgtccccgatacttttccgctgccgcccgccaggtccgtccctccgagcataacagccgcaacaccttcaaacatatagctggcgcccgcgtcggctctggccgtcgccagcctggacgtcaccactacgccggaaagtccggccataagagcagctgctccgtagcagaggatgatcgtctttttgacgttgatccccgcaaattttgaaccggtctgtccggagccgataagatataccttccgtccgaatctgcctttgttcatcatgaccgtcatcagtatgacaagcgcggccagcagaaagagctggagcggtatccccgccagatagccgtgcccgagcatgagaaagtcttccgggaaaccggagatcgcatctccctttgacagcgccagtccgatcccctgatagagcgtcattgttccaagtgtggcaagcatgggggcaatatttaattccccgacgagccatccgttaaagagcccggccgcgagcgccgccgcaagtccgagaaggaccgccgcccatatattcataccgcttttaaagagaactcccaccgtcaccgacgtcatgccgatcattgcagagctcgacatgtcaaatcctccggtcagtataacaagcatgatcccaagggacacgatgccaagctcactcatctgctgcagaattctcatcagattgccgaatgtcagaaattcacgtgtcgtcgcggcaagaaaaacggtgagtcccagaaacacgatgagaagcagtctgtcatttccttctaaagttttcgtttttttcttcatctgtcttccccctagtctgccttggccggctgcatccggtcaaatatatgcgggagtctgtattccccctgttccctctttgtgttgactgcgtctataatgaccggtatcacgatacagatgccgttcagaatattctgccagtacgcctgcacatgggcaagtacgagcgcattctgtatgaggccaagcagcaggacgccgagcagcgtggacaggacatttccctttcctccgttgatgctcgtccctcccagcacaacgctcgcaacgatcgtcatctccagaccgtttgcggccgtcggaaggatcgcgccgctcggcgaaaagtaaacgatcgccgcgattccggtcagcgctccgagggaggcaaatacaaagatgtacaccttgctcaggctgactcccatccgcaccgcagctgtcttattgccgcccactgcatatatctggcggccgatagccgtataccgcagtatgaagtgcattgcggcggccgcggcggcgagtatatatatgcttatgggaaggccgagccatttgccggtgccaagcgacagaaaatacttcggcagccccatgagccagcttcctctcgtccagtccagtatgaatccgcggaagatgttcatcatggcaagagagacaatgatcggcggcaggttcgtcctggccacgagcgtaccgtttaccgccccgagaagactgccgatcacaaaaaatgcaaggaacatcgtaacgatattaagcacctgcatctgcatgagctttcccgccagtaccccgaccgttacaagctgcgcggacacagatatatcaatgcctcctacgatgagcactgccgtcatgcccactgccatgatggcgttggcggcgttggtggatattatgttgattatattaaacggcgtcagaaactgcgggtttatcacagtcgtgatcaccgccactatgaggatcgccagcagaagggtcgtttcccgttttgcaaatattttcttcatttcaaactcctttccggatatcagagcgctttttccagaatcttttcctgtgttgcctcacctgactccatctctccgacgatcttcccctttttcataatgacgatccggtcggagaccttcaagatctccggcagttcggaggagatgacgatcacacccatcccctttctggccaggtcccgcagcagccggtggatctctgctttcgcgccgatatccactcccgctgtcggttcatctactataaagatcttcgggtctgtggaaagccattttccaactactactttctgggcgtttccgcctgagaggttctctatatccatctccggaaggcgcggacggatatccagtttctccatattctcggctacgagcgcctcttccttctttcggtccaaaagccccagcttaccgcttatcttttcgagcaccgccgcagacagattggcgcgcacgctctgcttcacaatgatgccctgcgtcatgcggttctccggcaggtaggcaagtccttttctgatcgcgctttgaggacttcctatgacacccctttcaccgtccagatataattcgcccgcatccggccttgttattccaaatacgctctggaacagctcgcttctcccggcgcccacaagaccggtgagccctacgacctcgcctctgtaaagcgtaaaatctacatcctcaaagctgccgttttttgaatatcccttgagttccagaagtttttcccggcgttccaccggtttcttcttctccatctcatcaatttttcttcctaccatatggacgaccagctgatcttctgacatttcctccgtctgaaacgttccgatgtaatttccgtcccgcaggatactgatgcggtctgacacacggaagatctcctcgaacttatgactgatatacagaatagatatgttctttttccggagcatgtctattatgcggtacagcttttccacttccccgcttgacagagaagcggtcggctcatccattacgatcactcttgactcaaagtacactgcccttgcgatagctacaagctgctgtaccccgatgctcacgtcctccagccgttttctcgtatcgatctctatatccagaagcttcagcgcttctttggccaccttctcctggcgggaatggctgatgagtcttttcttgtccctgcccatgcagatattttccgcaatggacaggttcgggtacagactgatgtcctggtatatgatggagatgccctgtttgatggcagaatacggatccgtgacagtctcttctgtccagccaaggcggatccttccaccctcgtccgggcggtagacgcctgccagcactttgatcagcgtagacttccccgccccattctcgcccacaagcgcatgtacctctccctctctcagttcaagatttacatcatttaatgccttcaccccgggaaacgtcttactgatatgctccaggcaaactgcaattttatctgacactgcttcacaccccttcctctatgcagacctttctatttttcaagtgcaaatatctcgctcctgtcaaggaggaacgggaacatcaccccgttattgccgctcatgggcagtacatcctcatgtaccgggataccaagtttcttacgcataaactcctgccgtctcacaattctatcgtatacttcgggatattcacttcttaacgcttctcttaactgctcatctgcaatgacgatcgtatcttcacagatagcagccatgaccggatctgtcatacaggctacaatgtcacactgaaagtgcatgccgctgtaaagctttatctctgactgtccgctgaccggagaattgctccactcatccatgccgatacagtgtcccggattcagcgcaactccgtattttttctctccaacgtaccggtgtacgatttcaaagatctctttccctgtcacaccctcggtcactgccgcgtaccacgaggcgatcgcgtgccagtaattttcataaaacgcgtcaaattctttcttctgttcttctccgagcctgtcataacctgtggcagccattccggacctggcacacatggagccgcgcacggagtatgagatcgtcatcggactgccgtcatcgagcacggaaaagtcgtccggactcttaagtccgaggctcacggagcgctcacctgccaaaatgttcggatatgccatgcactctcttagatccgcgcccgctttccgggatatttctatctctgtcatgccggccctggcatttttcagcattcttcttacgcagttggcggcagtcacagactggtattcgataaatgcgatctcatttgcatctcttaccatcatgcgcagcccgtttggcaggccggtgatctctctcgtaaagtctgtcacctgatcttctcccgccgccttctgaagtgaacggacgatataataagggacgtcaaatgtataggcctcttcctcctccactgccgtctcataatatttaacacccgaaagtccgatcctgctgcctttgcggatgccgacagactccatcatctgtgacagtgaagcggcgctgtttcttggctgtccctgaaggctgaagttgccgtaatacagacgctccgcttcgtatggtattatgtagctgtaggccattccctcatttccggccacgatccacgtctttccgtcctttctgacgatcagaagcgtctcctcaaaccggcagtcgtaacgtgtaaaatattcaatatttgcgaaatgctccctgtccccatagagcactgcaaagtcgagatgcttctcctgtatcctttttgtaagaagctcttttcttttccggtatacgctgtccttaaggtgcaccggagctgcctgctcctcattcagaatcccttccgggctcgttatctttattactttgctcatgttgttctcctcctgatctttatcggtaatgtctgtcttctgccttttgtcagcggcggaaaacagaatcgcatacctttcctgtcgattttctgtctatccttctgcattgaaacatagtgctttctatctgatgctccggatcgctgatttttgccagcagttcttctattgccacctcacccattttcttaagcggcatctccatcgtcgtcagatttggcacgaccgcctttgacacgatgctgttgtcgacccccatgacggaaatgtcttccggcacgcggtatccgctgccctggatctcttctatcatgcctaccgccatattgtcattgccgcatataacggctgtgggcggctcgggcagcgccagcagttcttttgcacagcgccgtccgctttctatcgtaaaatccccgtctcttacatattctttgttcagcttaaactcatattttgtgattgctttgatatagcctctgtaccgcagccggatatgctgctggtcactttttacatccacgaacgcgatcttttcatggccgagttccgccagatgatctaccatgctgacagtcatctgttcattgtcaaactgtatacaggcatggtttgtaaaatcgcttttgttctccagcagaacatatggaaaatcttctctgagaaaaagcttcagcatttctttcggcacttcccacgccgacagtatcgccgcaccgtcaatgatccggccctgaatacagtcttccatataaccgagagaatactcttcttcccctatctgtccgatcttgatctgcagattatatcttgtcttgtgcagacggtcattgatggcctggataagcggaagctggtgaagccaggtggaatctccgatctcctgctcggacaatatgtacagaagtatggtatttgtcctgccgctcgccagtctctgagccattgtgttcggggtaaaatgaagcactttgatcgcattttctatgcgctctctgttcttttctttcactccgtcagggttattcagataattcgagatcgtgccgacagctaccccggctaatttcgccacgtcccgcaacgttggattcttttttcccatatgccacccctgctgctttaacttgaaccagtacaatttaattatcctatacggactgttaaaataatattggtaataaatggtcgtaagcgctgtaagtatgaaccggttcatttacaactttaattctaatgttggacatgttcatttgctattgacgaaagcacataatttgatttttcatttttatcacttatcacagtatttacggcggaacggtttcattccctgccggaatgttgacatgcggcaatacgctctataatataggctgatatacacatatgggatgttacggaggaaaacgatatgggaatctttacgaatggatatttagaaagcagagataaaaaaagaaaagcgccgctgttcacactttcaaatgaaacgatgtcggtgacgatctgctcttatggagggtatatcacttcgcttcttgttccggaccgctgcggaacgcccggcgatatcgctcttggttttgactgtctggatgactatgaggcctgtacctttgcgccgtgcggcattgtcggaaggtatgcgaaccggatcaggaacggaaggttttcgctgaacggcagagacgtacaggtgacacaaaacgacggaatacaccatctgcacggcggaaaaaaaggattccaccgatatatgtggaatccttctgttcatatgtgcggcagcggcgcggaatatctccagctggaacggttaagcccagacggtgaggaagggtttcccggaaatctgtccgtctgtgtccgcttctcgctgagcaggcgcaatgagctttccatccacttcctcgctgtcagtgacagagatacggtatgtaatctttcaaatcatatggcagtcaacctgaatacatgccgcgggacaacgtgccttgaccaccggcttacgatatacggacgtactttttctcctgcttccccggacggcataccaacaggggaagtgctcccggtggaacatacgaatctggactttagggaagaacggcttctcggagcgcagcttctgcttccgtccaggcatacggaaccgttcggcggtctggaccacaactggtttctggaggacaaatcgcctatgcgccgctgtcttacgctttcccatccgggcagcggacgggtcatggaatgtctgacgaccatgccatgtgtccacgtatatacgtccaattccctcaccggcagtgagacgggaaagtacgggacgccttataacagacagtgcgccttttttaccgagacgcagtacgcgccggacagcgtcagccatcccgggtgggcgcagccgttccttaaggcgggccggcagtacgaccatacgacggtctaccggtttacattactttgagtcatattgcattatcgtctgctggatggcgtctttcacctgctcagcgatctctgttgttttcatgtctttatactcgtcatagtacattggtttcaggaaatgtacctggactgttacaggctttatcgtacttgagtcaaacggcacgaatgaattgacaagagcaaccgggacgatggggcatcttgcctttgtggcagccttgaagctccctcctttgaacggctgcacctcgttgccgtttctcgagcgggtcccttctgcaaatatgagataatttctgccgttctttacttcatccgctacgtcgatgatcacctgcattgcctggcggacattgtcgcggtctatcatatacgccttcatacacgcaaatacctgtttcaggaactgtatgtgcgccacttcctttttagccactacagagaacggcctgggacacgcctgtacgaccgccagcacatcatacaggccctggtggtttggaaagaacatgaatccgtctttttcaggtatgttctccctgccgtagacctcgatcgtaacatttccgcctttgttcgcgcgggtcgtgataaacttaagcatttcaaaccgcttttcttccgaatacttatccacatgggaggcataatagcataatttggcccacataaacggtaccaggataatattcctgaataccataagtaatattctcttcattatttctcgtactccttaattgcagtttcgtataaattgttgcccgcgctgtccgccacaacgattaccggaaaatcctccacggtcagtttacgtatcgcttccgtgccgaggtcatcgtacgcaacgacttctgattctttgatacatttggacagaagcgctcctgctcctcctaccgccgccatgtatacgctctcgtttctgacgaccgcgtccagcacctctttgcttctctttccttttccgatcatggccccgagtcccatgtcgagcagtctcggtgtgtatttatccatgcggctggctgtcgtagggcctgccgaaccgatagggcggccttctcttgccggcgacggccccatataatagatcacctggccgttcaggtccaccggcagcgcttcctttctggagagtgtctcatccattcgtttgtgggcagcgtcccttgctgtatagatcgtcccggtcagatagatatattcccccgcgcgcagtgtacgggcaacatcctttgtgatcggcgccgcgatatgcttttccatcattttgtctttcctttcctgtatttataactgctttatatttctcttatcacgtgtctgtttacatggcagcatatattgactgccacgggaagcccggcaatatgggtcgggtaagtgtttacattcaccgccagcgctgtcgttgtgcctccaagcccgccggggccgatgccgagaccgtttatcttctcaagcagctcttcctccagctcatgcacccacggaatctccgagtgggaaccggcttctctcgtgagcgcctccttcgacagaagggcacatttctcaaacgtgcctccgatgccgacgcccaccaccataggcgggcaggcgttgggacccgcgtctttgactgcggtcaggacagcacttttcaccccgtccagtccgtctgccggcttcagcataaatacccggctcatattctcactgccgaatcccttcggggcaaccttgacggtcacgttctccccgggaacgatacggtaatggataacggccggggtattgtcttttgtgttctctcttataacagggtcccctaccacggatttgcgcaggaacccttccgtatatcccttacgcacgccttcattcacagcgtcctcaagacttccgcccacaaaatggacgtcctgccccgcctcgataaagacgaccgccatgcctgtatcctgacagatcgggatcatatcgccggcagcaatcttaagattctcctgcagctgctccagaatctgtctgccaagcggagactcttccgctccggcggcatccttcatcgccttgtccatatctttcgataaataatggttcgcttctatacacatttctttaatattatctgtaataacacttacgtcaactgtgcgcataattttcctcccggattcaaattaggatagttttcacttattttatagtataaaggttttgacgctgtatgtcaaaatcgggttggaacgggttggggacgggggaaatttaaatttcccccgtccccaacccgattttcccctgtccccgattgaacttttccacaagtaaggctataatatgaccaggagttttttgataattctacatataagaaatgggaggtttctatcatgacaacagatataaatatggaacagctgcaaaaggatgccgtagatatttttcactccggttttgcctgttctgaatctatcatctatgccatcaaaaaaaactttgagctggacatgtctgatgacgccatcgcgatgagttccggctttccgtgggggcttgggggcggcggatgtatctgcggcgcgcttgccgggggcacgatgtgcatcgggtatttcttcggcaggacaacgccgggagatgagaagatcaataagtgttttgagcttaccaatgagcttcatgatcactttaaagaaacttgcggcggtacgtgctgccgtgttcttacaaggggaatggaacggaattcacctgagagaaaagcacagtgtacaaagtttgtcgctgatacggtcaaaaagacagctgagatcatcataagagagctgtagccgcgcgcagcaaaaccgtcaaagaaaggaacaggttgtggaaactcgaaaaaacttacgaaaaaagatacggagggtagatgtccaggtctctatcctgatcattgtcacaactatattctgttcttctgtcgtgttcttcatcggctacacgctgacatacaacgacatgataatgaatctggaagacagagtcaccgctatccacgattatcttgaagacagccttgacaaaagcaccttccgggatatcaacacaaaggaagatatgaacaagctctcttacatctccatgaaaaaagttctggaagatgtaaagatgtcgaccaacgtccgttacctgtacactgccaaaaaggacagcagcggaaatttcatctatgtgatcgacggtctggattacgaggcgaaggacttccgctatcccggagatacgatagagcaggaaatatataaagatatggagctcgccctgaacggggagaccgtactgccggaagagataaaaaagacagactggggaaatatatttattacttattttcccatacatgataaagatgaagtcgtaggcgtgctcggtattgagtttgaggcagcccaccagtatgacacataccacatgatgaagctttttcttccggtcatcatccttgtgacgtgtattatcggaactgtcatagctgtcctcgttttccgcagagtctccaatccggcctacaaagatatggcgaacacggatcagctgacacagcttaaaaaccgtaattcttttgagacagatctgaataatctggatgccaggacaaaaaaagacaatttcggcattatcattgccgaccttaacaatttaaagcttgtcaatgaccagttcggccacagcagcggggacatatgcatactgaccgccgccagggcaatacagtccgtcctgccgaagaacagcgccgcctaccggcttggcggtgatgaatttgtcatcctgtcctgggatacgaatgaggaggaaatacgaagctttaaagaaaatgtcagtcaaagcctggaggaaatgtcagaggaaattgaaccgaatatacccttgtcactttcaatcggatgggaattatatgaccccgcagtagataaggatctgaaagaactgtttaaacgtgcggatgaagacatgtacagacataaaaaagaattccatgaaaatgatgagctctaaaaatatccatctgctcatctttattatcagccggcgcctccaggtgccggctttaaatttaaactttttctcaaaaacctaataccgtatgatttacttgtcacgcaaaaataagtatactccttacatattagatgtctgtttatatacacagcctgtataacggcggggatcatatgtttctgcagccgaaacagatatatggcagaggaggatgtattgtaatgaaaatacagagtaagaagagaacattaaaacgatccatttgcatactggtgacaggggcttttattctaacatcgttttccactgtcgtgctggcgcaggacgcaccaacactggaaaattccggcggcgtgactgcggacgaactgccggacggggcggacgctgtcagtgttccctttggtacagaacaggatgccatcccatttccggagttgacagcagacggaggaaagactgcactggaggacgttacatggaactgcggcacatatcattccgatcagcccggagaatatgtatttactgccgtgctgcccgaagggtatattcctccggagtcacagcagcagggcattactgtaacaataacagtgcagactccgatcacacagtcacagattccaacttccccaaatgtatcagaccaagtggagccgcgcgccgccaatcaggcccctaacactaaaacggtatctctgaacggatctagcacttttgaagaggcagccgcaggagcaggaatttcctcacctgatagtgttaataaactcatcataacgggaaaaaccgacggcggtatttggacacaagccgatgggaaatatctcaggaacaatttcctacatgcagctgaactggattttggtaactataagggtactttttccgggtatgctttttccgcaaacactcaattatcaaaaattcggctgcccgctgattcaaagctttcagactttatgtttcagaactgtcgcaaactcagaacgcttgtttgcggccccgagacctcggtctcgttcgaggatggtgtcattgacctgaccggcgcggtcttttctgatgaacaatataccttttccgaaagcggcatagaaaagatacgtctcccagcaaatgcaaacgtctcatattttatgttccagttctgctggagtctgaaaacattaaagtgcggcagcggtcgtcttactgatgacgtcattgacttgtccggcgcagcctccatcaagggaggcgcatttgcatccagcagtatcaaaaatgtccgcctgcccgcaaacgcggtaattcccgcttctatatttcgcagctgtaagaatctgaaatcactcgtatgcggtccggcggagtcggtctccatccaggatggcatcattgatctgaccggtgcggcctcgatcgggagagactcattctcatccagcagtgtcaaaaaagtccggctgcctgcggatgtagctataccacctcaaatgtttgaagattgccattccctgaatactcttgcctttgtcggtaataacaccgccccagccgttgcagtcaactctttcagcggtgttcccaatgacaatagctgcacgctgtactaccctgccgggtcaggcggatatgaaagcggcgtgtttgcggcgccgcatctggatcagtggtcccgcaaagaatactcggacatccagatcgacgtacatccgtccgtgcagaatatttttgacaaacaggacgcaagctatttcgtggccgccgccggctccccggctctaagctaccagtggcagatctccacagacagtggacgcagatgggaggatctggccgataccggcgtctattccggagctgccacggatacgctgtccctcacaaatgtacctctggccgctaatggaagccagtttcgctgcatcgtttataatgacgtgcagacgctggccagcaatgccgcctcactgacggtgaaaaagaaaaacgtgcctccaggacagaaaaatgggggcaagaacgggcagacagaaacagaaaatcagggcaagggcgtcaaaacgggtgatgagacaaacctgtctttgtggatcatactggctgcctcgggaatcggaatgctttctgccgtatggtacagaaagcgcaaatgcagaaagcattaaagcaaacatatgacagatatatatgtctggtcaaggtcaccggatcagccggtgacctgttttgcatatatattagtatgaattagaacatacggactctttgatcgcttcaaatataagctgtccggctgccgcgcctccgtccaggatgcccagacttttttctccatagtaggctgcccgtccgtgtctggacagcatcatccttgtcgactcagcccccttttttgccgcctctgccgcactttcatatgcttttgccagctcttctgacgcgtgttccttcaatgcttctgatgccggatacagtgcgtccagaattgttttttcacctggcatggatccggccttctccattattttttcaaggcctgaccggaaagcatctgccgtctcttttaccgacacctcttcttttcctttcagcgctttcgccatacccatcatgccgatagacaatatagtgccgagactggatggagcggcctcattgaacgtacctgacatacccatcataaggcggccaagatccttttcatctgtatttgataaaaagtgccgcgccgctgcgaaaccttccttcatggaaatgcccaggtctccgtctccgttttgctggtcaagttcaacgagataaagacacttttcatccatcttccggctgataaagtccacagccttgtttaagctttccttctgcatatatatcaactccttttatttgttgcagttagtgtagaaaggtgactttgccggccgcagcagcagttctttcaattctttgtccagttttattatcgtgacagacagccctgccatctccatggaagtggcaaattcaccgatatgaggcatgatgaccaccactcccttttgttctgccagtctgcagaccgcgcggtaaacgatgaactgctcttccagcggcgtacctccgagcccgtttatcataatggatatctcatctcctctttcaagaggcatatcctcagtgagcgcattaaacattttcccggcggtctcatccgcggtcatcatcttctctacagagattcccttctccccatggatgcccattccaacttccatctcatcatctgcaatggaaaatccgggggtgccaactctcggaactatgcacggagtaagcgcgacgcctatcgttctcacagaagacagcgctctttttgtcacttccgctgtttcgtgcagagacattccctgatccgcagcggccccggcaattttaaacgcgtataccatacccgctacacctcttcgtttatccgccttttctgccggactgctcgctacatcatcacttacgatgaccgtctctgtcttgatatcatccatatcggccatttcacaggccatgtcaaagttaagcctgtctccgccgtaattcccatagaggcacagtacgccgcttccccggtctgcctttgtgatcgcgtccgccatcgtccgggcggaagggcttgcaaatacattgcccactgcacatgcatccagaagcccctgcccgacatagccaaggaacaccggaagatgtccgcttccgccgccggtcacgatcccgaccttatgtgtgtccgctggatatttggaatacagcactcttttgttctcctccaataatcccaatttatccccgtaagccgcgataatgccctgcagagtatcatcttcaaaagtctccgggctgttcattatctttttcatctgctccatcctttcaatcttttttattcttatttatccattcagtatgcgatctctaaatacagccgcattactgctgaactttatctgcgcttccttaagctgcgccagcacttcctcctgcgtaaggccgaacgtatccctggctgacgggatcgtcgtctggcattcgttgctgtccataaaatggactccctcgagcaggtgctccgtctcctcctccggtatggctataaatccatatttatccgcatggatcagcatgccgggctttacctttgccccaaatacttctatttcattcccaaaccttaaggggcaggaatacgtgtgggatactcccagccgcctggccatcatcttaaatccgccgtatgcggcctcatccacatcacggacaaatccgtcatctatacagccgacacaccccaacgctttataagcgttccctgtgacctcgccaaagattgagcctgtcatgtccggcgcgtccaggtcttttgccacaattactttcggtcccggtatgccggccagatactcgtaaaacttcagatagcagtccggattctcttcctttgtcttcgcatccgaacatacatattccactgtcaccgcgtatcctgtcatcgctcccatctggggcgcatagtcctgcacttcttctctgctcatgcagcaggaaagacggtctctttctgccactgattcccatccgttgtatatagtaggtgtattccatctcctgagttccagtaaatctgcgtgcgacaattttcccatttctttaaccttcctttctgtctataccttgtttttatcttattcctttttcaacatttccattgcctgcaggaggagctctttattttctgccaggacatcctcaatatccgcatcagacagcggcttgatctcaaatgaaacgaccggccggtctgattcgttcagaaatccggtatgggccagtatccccaaatatccggacatctcttccttaccgatacaactgccgggatatgaaaagggtggatgacagtctccgtacagcggagaacctttttccatcacacagttgccgatatgagtccttctcatatagggaagcagattatggagcgcctcttctatcgtctcgtgctgctgcggaatatgacttaagtccgggagaagccagaaattatcgtgctcttttcttaccgcttcggcaagtcttaccgcacgttcggacggccctataagagaacgcttctccacatcatagtcaaataattcaatctcgatctgcagccttcccttcgcataactgcacatttcccctgcagattctgccaggtactccatcgcttcctcaacagcgtcctctgcaaaagtaccggccagaaacgaaagcgacccggcgccaagcccgcatgcctcatcgatgcattctttcatccgaagaagggctctttcccgctcttcccttaccggagaattcagattcaggccattctgcagaattacaggctgggcgcagtaagctgttgtcatcttactgtctttcagcacctttcccgcttcttctctcagcccggggtctgaaatatatgtaagctcaactgcttcatagaaagggtcgtctgcgatccgtctcagacacttcatgtaatagtctggtctcctctgacatccgggaaatgcagcctctaatacagtccccaccttcatacgcttcatcatatctgacccatgagtgaagtattgacaagattgtgaggtctgacatgcgcaagtacagacagggaaccgtccagcgcctcccacgccatgttcctcctcgcctcatatacattacttccaatatgcggggacagtacgatattgttaagctttgtgatctcttcacttatatgcggctcattttcgtatacatccgtcgcggcgccccggatcattttattttttactgcatatacaagcgccggctcatccatgatcggacctctggcaacatttataaaataagcggtcttcttcatcttccggaatgcttctgcaccgataacgtgatgattttcttctgtatacggcatatggcagcttactacatctgccttttccaacacctcgtcaaaggtgcagtagaccgcgtccatctctttttctgcatcctctttccggtatgggtcatagtagatgatgttcatgccaagtccctttgccttccttgcggccgcctgaccgatcctgccgaatcccagaatgccaagtgtcttcccgtacagcatgatatcccggtcaaaaaagcataccgatgccgttcttttcgtctcccttacctcccggtcatacataagcgttccccgggtgatcgacatcatcagcgcgatggtaaattccgctgtcggttcacatacagataccggtgtattgatgacgcatatatttctttcagtacaggcctgtacatcaatattgtcatatcctaccccgagattacacactgctttcagattcacagccttttctatcagatcgtctctgaacggaaacgctgatatcgtaaagaggacgtcaaaccgtccgatcatgccgctgacttccccgaccgtataatttgtcttttcctcgtccggcagcacgatctcctcaaactgctccctgtattttccgatgatatcttccggtatccatccggtcactaataattttgccatcgttttattctctcctttcaatcgcctgtaaataataatgtatctttgaagtctcttctatttcctctattccataaaatgcactccggatatccgtccctccgataagggggccatggtcagccagcagatatccgccgctgtcatgcacccgctgcgccagtgcgtcaaataactctgccgacccgggtactgcccttggtatcattcctatcgttcctaccttcatcctgagataaggtgtgatgtctgaaaaaacatcccggctctgttcatctgccatgcaggagacaagcgttgaataaaagctgtgagtatgtatgactgcatgtatttccggctttgcatcatatatgatcttgtgcagcggatattccttactcggttttatatccgacagctgtcttccgctgctgtcgaccactgcaaagtccgatcgtccaagccacccaaagcatgttccgcttccggatatatacatattccccccgtatctgaagcttatatttcccgtcgaaccagtcactttatttctgtcaaacaaaagccctgccgcgcgcactgcctcttcaaaacatgtctctaaactttgttccataactctcctttcccgtccggcgc

SEQ ID NO: 431 - DNA, 15326 bp, Extibacter hylemonae
  source 1..15326: mol_type = genomic DNA
gcgcactgaccggctctgagttccccccttccttcccttcgccgtacaccatcaactccctcaaatatcattctccgcacacactgcctggtaagcccatacgtttctttcaggtatgatacgctacccacttgcccgaactggtcgttcaccccgatctttctgagggggatgcctgtgccgtcctctgagagtacgtcggacacggcggaaccgagtccgttgatcacactgtggttttcaaaggtgacgataagctgtttgccttttgcctcctgcaggatcaatgcgctgtccagaggcttaacggtaaacatatcgacgacctccgtggagatgccgtcctgttccagttcatttgcggctcttaaggcgtcgccgagcacttctcccatggagatgagaaggacgtccctgccttcttttatgatgtttccttttccgatctcaaaggtagagccctgctcgtatatccggtccgccgctttccggctggcgcggatatagtgtattcccttgaggggagccagtgtgcgcacaagccattcaagctggacatcgtccgccgggtcaaagacgagagcttccggaagcgcccgcataaaggcgagatcctcgaaggaagtatgggtgcctccgtttgtcgccgcgcacacaccggggtcagaagcatagatgtttatcgtattttttgcatatgtgccggagagaaagagctggtcctccaccctccgggacgcaaacgggcaaaaggtatggacgtacggaatataaccgagcatggacagccccgccgccaccccgatcatgtttgcctcagcgatcccaacgtccagaaactggtccgggtgtgatttttttatgtccagaaaaccggaggcgcctccaagatctgcttccagggcaataacagctttatctgcagacatcatgtcctgcagtgtctccgtgaaaacctgttttaactctttgcttttttcttctgtctcactgcataatctccacattattgttcctccagtctgtaagtatcggccagttcatcaagtattttatctacttcccggcagtcctgttcattaaactttaccgaatggttggattccattttttcaaaatacgcggatccctgccccttgacagtgtccaggatgatgcagaccgctgagtcctcaaccgctttcgcccggcgcacagcgtccgagatctgtcgttcatcggcgccgtcaaccgtctctgtgtgaaaaccaaatgccttcattttatcttcgagggagaacgggttgaggatgtcggctgtgtagccgtcgagctgtcgtttgttatcgtcgatcagtacgatgacattgtgaagcttatgatgtgcgataaactggaaggcctcccagcactgtccctcattcagttcgccgtctcctgtgatgaggtacacaaaacgggtggaatttttcagtttcaatccatatccgagtcctgctgccacagacgtaccctggccgagggagccggttgtggcgtccacgcccggcgtctttgtgcggtccgggtgggaggggaaacgggtgccgccttcatttaatgtgtacagttcctcttcaggaaagaatcccgccgtgcacagggcagcataaagccccggccccgcgtgtccttttgacaggacgagcagatcccgctcttcccagtccggatcgcgcgggtcatacttcatctgctctccgtatagtacagagaggacttccacgatggacatggagccgcccagatgtccgcctttcttggctttcaaaagcttcagaaggaccgtgcggattctggcagaatactgtttcagattttgttccatagatgtcgcctccttaaacgagtgaacggatgatctcttttcccgcgctggcgccgagacggtccgcgcctgcggccagcattttttcagcatcttccagtgtgcggacgcctccggaggctttgacccccacgccgctgcctacggttttgcgcatgagcgccacatcgtgcgctgtcgccccgccctttgaaaaaccggttgaagttttcacaaaatcagcgccggcttctttggcgatctcacataccttcactttttcctcatctgtgagaaggcacgtctcaatgatcactttcacaagagcatcctttttaacggccgttaccgcccggatatctttattaacgagttcccagtcgccggattttaccgcgccgatgttgacgaccatgtctacttcctgcgcgccctgtccgatgacataggcggcctccattgctttcatctcaggagtctcgctgccgagcgggaagctgataacgcagcatgcttttacgccggtctcctttagctgttctgatacgagtgagatccacgccggattgacgcatacagatgcaaagtggtattgttctgcctcccggcagatctgcaggatatcttctttcgctgcgtcggctttcagaagtgtgtggtctatataagaagccatctcccggcgggtgtaagtttttgtgtccatgtctgttcctcctttttatgcgtcttagatctcaatgacgactttctgggcagcagcccggttattttctacatattgataagcttctgcatactggtcgaatgtaaatgtcttcgttatgagactctttagatcagccttctgctctccggcaaggcgtactgcgtccatataatcttcgtgggtgtacatcagtgttccaagaagtgcgtattcccggtcctgcacggccgccatatcgaccttcggcatatcttcaaatacacctacgatgacgatactgataccttttggggcaatgttgatggcgtcgtttaatacagattctacggcagagcactcgaggatcagatcgagctgttcttcgccaagcgtttcacggaccgcgtcccggaggcttttgtccttaacgttgactgtattggaaatgccgcattttctggccagcttaagtttgtaatccgagatatcggtgatgatcacgtttgccgcgccaaggcctaaggctgcctgggccgccacattgccgatcgtaccggcgccgcagacgagtatgtttttcccggccgggttcccggcccgcttgaccgcgtgcacgccgacggccaacggttccagaacagtgccttccgcataggaaagggtgtccggtatcttataaagaatagaagtttccacggcaaaatattcagaggaaccgccggtgctcaggcagccgagcacatttaattcttcgcatatattgtagcgtccttccctgcacggacggcattttccgcacgtgcgctgcggacggatgacgacacggtccccttccgtaaggccgtcatgcgctccgggcccgaaagacacgatctcgccgctggcctcatgccctaatacaataggagtatgtacgaagggatgctttccaaaataagtgtggatatcagaaccacagatacctaccgccttcattttcagcagcgcctgtccttctcctggtacgggaatttctacattccggcatgcaaatgattttggctcatctaaaatgacttgtttcatcataggactcataattattgacctcctttaaatgtatgataaattttgagcttattttatcatgttatgattgttaagtcaacaaaatgaataaataacaatcaaaaaagagaaaaataattgacaataagtcaaaagtatgataatttaaattaaaataaatgattgaaaaagattggaaatgattaccagttaatttcctctcagaagtattcaatcaaaaacaaactatcttatttaaagaaggaggaacagatatgaagaagagattattaagtgtgcttctctgtgtagcgatgacagcgtctatggtgatcggatgcggcgccaaagaggagaagaaagacgattctgccaagacggagagcagtgacaacaaggatgggaagatttatcttctgcacaaagggcttgactactatgcatgggcggccatgcaggaggcgtttgacaagtacgcgggtgatctggactgtaattatgagatcctgaatgcagaaaacgatgtttccaaacaggtggaacagttcaagactgtacttacccaggatccgaaggcgatcattgttacagcgatcgactcggaaagtctgatcgactgtgtaaaagaagcaaatgacgccggcattccggtcggcgtatacgacactccgatcacaggcggagacatcgatatcacggtagactgcgataacctcatggcggggcagcaggcggcagagatcatcgtagacaaactgaaagaaaagaacggggaagaaaaaggaaaagtgctgaatgtattcggcgatctggcaagccaggtaatgcaggagagaaaacagggatttgacaatgtaatggagaaatatccgaacattgaagtcatcgaagcaagcggcaagggcgaccgtcttctgtctcaggacgcggcatccaatgccctggcggcaaatgaagacattgacgcggtacatgctccgtgtgacaacgcgttctatggcgtatacgaggcggttgaatcagcgggcaagctgaaaaaagtcggcgaagagggacatatcatcatggtttcactggacggtgagccggcggcactcgaccgtatttctgaaggctatatggacggaacggtcaatcttgactggcatgcagttgcggcgatctgcctggaaatgatggacaagtatatctttgaaggcaaagacctgccggatacatatgaagcaaaagattcttactttaaattcgcatgggacagcacggaaatcaaggacgcctcagagtggaaaggcccatggatcagccttccgactcataagatcgacaaagacaacgcacaggatccgaacaattccggacgttattcagcggatgttctcggtatcgagtattaattccgacgggtcatgctggaagccaaataagtaattaacacggtttgggtgagcatgtggcagattgtcatatgctcattccattcataaggagatgaagacattgttgctggaagcgaaaaatatatgtaagagttttcatacgaaacaagtccttaacggcattgatttccaggtagaggaaggggagatccacggacttgtcggaaaaaacggggcgggaaaaagcacatttgtaaatataatcaccggactcatatcagattatgagggagaagttttctttgagggaaggaatatcgacagagagtctgtactgcacagacagaagtcggggctctttcttgtaccgcagcattcttccatcgtcacggaattttcagtggcggagaatatttttatcggtgtgtggccaaagaaaaaaaacggcacggtagaccgcaggaagatggaaagcatggcggaggaagtcctgaaagtgtacggtctgcgcgtctctgcgcagacaaaggcagggaagctgagcctcgtggagcagagaaaattaaatatcataagggctctcttcagcgaagcaaagcttatcatacttgacgagccgacgacatcgctcacaaaagaagaaagaaataatctgtttcaatttatagaggaattaagcaaaaaaggggtcagctttatattcatatcccactatctcgatgaagtcttaaaaatctgcagcaacatcaccgtattcaaggacgggtatgccggttctctccgcctgaaggaggagaggacggagctggagctgtctaaaatgatcgtgggcgaaagcgtggatctgttcagcaggaaaaagaatgtgaagccgccggaaggaccttgtacgctggagtgccgcgatcttcaggcagaatgcgtagaccatgtgtccatgaagatgtatccgggcaaggtggtggggtttgtcgggttcccggagtcgggtgcgcgggagatgctccgggtgctgggcggccttaaccggcttgcgtccggtaaacttatggacggaagcggtggggagatacgggtcagagatacgagaagcgccatccgccagggcattatgtatgtgccctttgacaggcacgaggaaggtctcgtacaggatatgtctattctgcacaatatcagcatatgtgtgatgaaggataagctgagcacgatggggtatatcaaaaacaggctggaactgaaaaatacgatgcaatactataaccggctggagatcaaggcacagaatgccaaagaaccgacccggacactgagcgggggcaaccagcagaaggtagttcttgcaaaagcactctgtacagaaccgaagctgctgcttctggacgagcccacgatcggcattgatatcgggagcagggaagagatcctgagtctcgtagacgagctggcgggagagggtatatccatcgtttatcatacaagtgattattcagaaatgctgagaatctgcgatgagatttgttttttccatgagggcaggttcgtcagacagatcgtaaatgagaatcttactgtagaagagatcacagacatacgggattctttgaaaggagccgagacagatgaaaagtaaaaattacagaggaaatatggtagaactgctgagcaataatattgtatggtttcttctcgtcatatcgctcatagtgatgggaatttaccagcctgcgttctttaccgtcacgatcattaaaaatattctgatccaggcgtcggcccttggcatcatgaccgtgggactggcgcatgtgctcctgctcggagagatagacttgtctattgtagggagtatggcgttttcagccgggctcggcacatatttgatgaaaaataatgtcctgccgtggtggcttgccattatctttatcataatcttcggctgtctcatcggactggtcaacggtctgatcatcacaaagctgaaagccgcgtctctcatcgagacgatcgccatgaacctgatccttatgggagggcttctggcattgacggcgggacgcacattcaccaattttccgcaggaatacaattatgtcggaaaaggaagcatagcggggataccgcttatgtccatactgctcgtgcttgtatttctctgcatcggatttctctggaacaagacgacattcgggcgaagcctctttgccgtgggcggaaatatcagctgcgccaaggcaagcggcatcaatgtagactgggtcaagatcatggcgttcgtcatttcctccgggctgtgtgccctggcaggatggatgtattctgcgtatatgggagctgttcccgcgtcctttggcgataacatgcagatgtacgcgcttgcgtcggccgtcatcggaggggtcagtctgacaggcggcgtcggcaaagtaaacggtgtgctgggaggtgttctgctgatcaccttattccaggtagggctgaatatactcggcatcaatccgtacttgatcaacacagccggcggctcaatgatcatggtggcggttatcatcgacgcgctgaagaataaatacaaagcaaatcactaaggaggtgacgtacatatgaaatataaatatggagttcattacgccgcatggggcagcgagtgggatgtggacataaaagaaaggatccgtctggcggcggcggccggatttgaagatctggaagtcactccgcctgattatgtccctgccatggacattgataaaatgaatgagctgaaaaagtgtgccgaagatcacggtattgaaatgagctggtgtatcggctttccgaaggaatatgatatggccagcgaagatccgtccgtcagaagaagagggatcgagtataccaagcatatgctggaggcgatccatatgctggacggtaagattttaagcggtatcctgtattccagctggccgtatgatttcaggaatctgccggacaaagaacgcacatgggagctggcgctttcttctgtgaaagagtgcgtaaagactgcgcaggactatgggatcatatatgcgatcgaaatggtgaaccgttttgaacagtttgttctgaacagtgtagaggaagggcttacgttcatcggacaggtcggttctccgtgctgccgtcttctgctcgacatgttccatatgggaattgaggagacgagcacaccggacgcgatccgcagggcagggaaaagcctcgcgcatctgcacgtctgccagaataaccggcagatacccgcgccgtgtgacaatgtaccgtgggaggcggtcgggcaggcggtaaacgacatcggctatgaaggccgcatcgtcatggagccgtttgtcataaaaggcggacccgtcggcagagacgtgaatatatggagaaatctcatggacgatgtgtcacaggaacacatcagtgaagaattgacaaaagggcttcattatatccagggtatcttcgggtaaaaaacaggaggaatcatatggcttgtattttgggaatcgatcttggaacttccagcgtcaaatctatgcttctggacgagacggcgggtgtggtaaagacagcttcccgcgcgtatactgtcagcatcccaaagcccggctttgcggagcaggacccggagacgtggtgggaggctgtaaagcagacgatccgggaactgaagactgactgcccggaccagttttgcgccatccgtgccgtcggcttttccgggcagatgcacgggcttgttctgacggggaagaaaggggaggtattaagacctgccatcctgtggctcgatcagaggtcggaccgtatggcagaacagatgcacagggaactcggaatggagcagatgggagagatctttcacaacagggctttttccggcttcgcctttccatcgcttctgtgggtgaaggaagaggagccggaagtatttaaaaagatccataagatacttctgcctaaagactatatccgtctgcgcatgaccggagaatgggggacggacgcgtcggatgcctcctccgcctgcatactgcgcacaggaaagcgggactgggcgtacgatatcataggacggtacaacataccggaggacatatttccagacgtacatgagtcggaagagaccgcaggctgtatcaccctcgcctgtgcgcaagagaccgggcttcccgcaggcatacgggtcgtgtacggaagcggggaccagccggcccagagcattggcaacggcgcggtgcgggaaggtctgatcatcagcaacatcggcacgggcgggcagatttccacatattcaggtacggatacatacgaccgcgggctgaggctccacacgttttgtcatgcgctgaacagggcatatactattttcggggccactctttgcagcggcatgtcgctgaactggctgaaggacaagatcctcggggccggcagcttccaggaactaagtgaagcggcgcaggagagcgaacctggcagcggcggtctcatctatctgccctatctgacgggagaacggacgccgcatatggacgccggcgccagcggcatgttctttggcatgaagctggcacacgaccggagagatcttatccgggctgtgatggaaggggttgtattttccctgaaggattcgctgcagatattcggggagatgggacttcgggccgagcgtatcatcgcgtccggcggaggggcggcaagtccggtatggctgcagatccaggcggacattcttgagaaggagatctgcgtgtgcagtgtaaaggagcaggcgtgccttggagcgtgcatcgtggccggagcaggtaccggtatgctggaaagtgtgtcagaaggcgtgagccgctacgtaagtttccgcggggacacatatgagccgagagaaaaactgcaggagatgtaccgggaaatgcacagaaaatatcagaagctgtacgaacatacgaaagacctgatgagatagaggaggggtaagaacgttgcacagaaaagaagaacgttgtctgaggctcggtgttctgggctgcggcatgatctgccaggcggcgcattttgaggcggctttgaaagcgggaaatgtggaattgtatgcgatctgtgatgtggcagaggatctgcttggccagatggcggatatgtatcactgcaggaagagatatacctcctatgaggaaatgctcaaagataatgagatagaggcggtgctcatcggcatcggggaccagttccatgcagagtgtacaaagcaggcgctgcgggcgggaaagcacgtactcgtagagaaaccaatgggtgtaacggtggaagaatgccgggaaatagaagaacttgtcaaagagacaggacttgtactgcaggttgggtacatgaagcggtttgatgaagggatacagttttcccggaagtttatccgcgaagaaataggagatgttctctccatcaaggcgtggtattgcgacggaacgtccagatataccctgactgataacgtgcagccatatatctttacgagcgggcagtcgagaaagccgtccggatgtccgaaggaaaacagggaacattattatctgctcggccattccggccatttatttgacacggtgcgctaccttatgggagacattgtcagtgtggaggcaaagctcatacagaagggggatatgtattcctggctcatttgtgcagatcttgagaacggcacggcaggcatgctggatcttacggtggcagtgcgccgggactggtatgaggggtttgaagtattcgggacagaggggactgtcatcgggaagacctttaacccatggctgttccagtcgacggaggcggaggcatattccctccggcggaatgaatatttccgccccatggcagcggacggacatttttaccggcggcagctggagggatttgcggatgtgatcctcaccggcgcacctcagaacggagcggacgcctccgacggaactgcggccatgtgcgccatgaaggctgtctatgattccgtccatgagggcggaagaaaaatctttcttagagatgtaagaggtggactctgatgaaaataggtatctttgcaaagacatgggcgggccgcggggatctggccgcggtgtttcgcgccgccggagcgtatggcatcgaaagcttccagtttaatatgtgtctggccggggggaaaacactgccggacaggtatgatccgaggctcgtgagcgaaattggaagtctggccgaacaatacaaaatagaactggcagccatgtcggggacgtttaacctgctggataaaaaccggctgggcgaatatacagaaaagacagagattcttatggagacgtgtgctgacctttccattccggttctgtctatctgcacggggacgaacagcacagagagtatgtggacgcgccatccggataatgactcggaggaaagctgggggctgatgaaggagcacctcgggcgccttctcatccttgccgaaaaatatccgatcactatcggcgtggagccggagacatcaaatgtagtctcttctgcccggaaggcccggcgtctcatggatgagtgccgtcattccagactgaagatcatactggatgcggccaacctgttccggcccggtgaaaaacagtttatgagagaaaggatcggggaggcggtcactattttgaaagaagatatcgtcctcgtacatgcgaaagactgtaagttaaacggacacctggcctataaggcggccggaaaaggagacattgactatacatattatattgcctgtctgagggaagcgggatatgacggcagcatgatcctgcacggcctttcggaggaggatgtggcagacagcattcgttttctgaagagtcagcttcaggcataaaggagtttatcatggggtattttgaacacggaggaatcagattctattaccgtacggccggaaaaggcattcccttcattcttctgcacgggatgggaggagatacgaagcagtgcgggagagtatttcatcctcccaagggcattcagatgatatatatggatcagcggggcaacggctatacagagataggtcctgtagaggaactgcggtttgaatcgatggccggggatgttgaagcgcttgcggatcatctgaaacttgaccgctttcttctcggcggcatttccatgggagccgcggtcgctgtcagatacgccattgagcatagagacagggttacggggcttgtgctcatccggcctgcatggacgcacgttccgatggaggttgaagtgcgggagctgtatcatcgggtggcatacctgatcgagacgtccgggagcccggaggaagcggcagatgcacttttaaaatgggaaaaataccggatattaagagcagaggagcccgctgcggcaagatcactgcttaagcatttttcagaagatagtattgagaaaaattatgagaagttccgcatactgccggagcagtccccgtttcataatccgggacagctgaaacagatcacatgtgagacgttagttctggcgtcaaaaaaggattttatccacaagttccagtatggtctttattacagggattatatagaaaatgcacaattagccgagatcgtcccaaagagtaaaagcgtgagaatgtataaccgaagcgtacaggaggaaatagaaagatttcttcagaaaatatgccagatatcagcctgacggcagacatacagcgtctgccgtctgtttttttgctggctaaaccgtaaaaactccgatttcatgttccttataataggaaatgtatttctggtccgtagacgcgtttgtgataatattcggtatctcatccagatcacatagatgcgtaaaagtacgtttgtcaaattttccttcgtcagccaggagatatatcaatttagaattcgagatcaaatgattatacagagggagctgggcccggctgatgatggaatagccattgttgagttctatgccgtctaccgtaaaaaacactttgtcaaaataaagcttgtccagcgcctgcaccgtgtactcgtccagagtctcgatatgattcgtgccgatatggacatttcctccgagaagcagaatagagatgttcgggttcggcacaagttccatgactgcggtcaggtttgttgtgacgactgtgatgttctctttgtcgttaatatatttgctgagcagattgcacgtcatgccggcgccgataaatataatatctcctgcggaaataaattcggacgccttcctggcgatctgttcttttgactttaaaaacgggtcgtaatccagcgacggcccggggtatccgtggtaggacctggatgagatacactgggcgcctccgtgggtttttttcaataacccgcgcttgtccagctgattcagatcccttcggatcgttgcaatagaagcgcctgtcagttcgcagaggaactttgttgtagctatttcgttcgtattcaggtactccagtatcattctttctcgttctgatgctaacattcaaattctccaaactaatagtattttcctaattataatataaaaaatgaaacagggtcaatagataatctcaaaaaagagcagaaaagaacaaaaagaagcagaaaacgcataaaaagtataaatgtattgtaattttttgataacaatgtattataataatggcggtatatatcataaacttatcgcagatcatataaaagcaggaacgcagcagccgatttatgaaaatgaaataaaaaggtaatgataaggttatggaaaaggagaggatggtcgtcctctctttttcatacggccagcgtatcactattaagtaatttcaaaatcagtggggtgaagaaatgagcaagacatatggatatgtacgagtatcaacgagagaacaaaatgaagaaagacagatgatagcactgcacaattttcccgttctgccggaaaacatatatatggataaacagagcggaaaagacttcaaccgtcccaagtaccagaagctgctgaaaaaactgaaaaagaaggatatcttagtggtcaaatccatagaccggcttggaagaaattacaaagagatactcgaccagtggagatatcttacaaagacgaaagaagtatatatcgtagttctggatatgccgctgctcgatacgagaaaaagcaatgatctgatcgggactcttatcgccgatatcgtgctgcagcttctgtcttatgtagcggagacggagagggagaacataaaacagaggcaggcggaagggatcgctgccgccaaggcaagaggcgtaaaattcggcaggccgaacaaaaaggtgccggtcaacttctataaagtatataaacgatggcactataagaagataagcggcagagaagcggccagacagcttggcgtctcttactccacgttcatgaaatgggccggctgtgcggacagaacttctgacagaataaaaaagtagactttatcaggcgcttcatatataataaaattatcggtaaaaaagagagaattttgtagataaacggaagaatcgtgaatacatatgcaataaaatgaattaacgtcgtttgttcaataaagtctacttttataaacagtattcattcacctatataaaggagggacaggtgtggaaaagaaaagttttcttgaatatctagctcaggaagcaggatgcgactgtctgtcagatctgcggctcagacaggaacaatggtcatcccgcattatagaaatattggaaaatgtagatacagaagaatatgtattcagcgactggaaagaggcgacttcctatctcacagatacggatataagtatattagatggaataaaaactaaaaaagaagcaaaagaatatattattgattggatgaattcaaaaaagcattgacaagggagatttcctttagtataataatgcgtgctggagaaatactcaagaggctgaagaggcgcccctgctaagggtgtaggtcgggtaaccggcgcgagggttcaaatccctctttctccgttagtcatgaacgactgtctgggactgaagtttcagacagttttttatggccgctgggcagaccggaatatttgccggccaggggctggcacttcaactattatatatagtagaaagtggtctgtgtggtacaagttatagtgtctgttaagagcttgtttaaaaaaagtaaaaaaaagataaaaaagcacttgacatttacagctaaaaaatgatactatatctgagctgacccaaacgggaatgcaaagaaccttgataattaaacaatagacaacaaccctgaaaatttcttaaaagagaaaaattcagaacggacatca

SEQ ID NO: 432 - DNA, 15099 bp, Extibacter hylemonae
  source 1..15099: mol_type = genomic DNA
cggcgccggcgccagcaagaacagcatcatcacccccagcaacagtgccagtatgcttttctttgttttcttcatgtggattcctccttcgtcagaacagatcaaactgttttgatctgccgcttctcccacaggaaataggcgtgcccgtgggagaactgccagcgcttttccgtaccgtgtttgatagctaagaacagtatagcataccaaaatgcaaactggaatagacgattaagtgagaaaaaagttgacgttttttcatgctgctgtgtcttttaggagcgcggctgcgcggaccggtgctgcgagaggtactgacggcctattaccccgacgaggcgcggaaggctgtccgcaaacactccaaaaatcccctgaaacgagtctgttcttggaagaaaaaccatctgccagccagatattttaaaaaaaatcaaaaatattagcactcaactgttgacagtgctgataattagtgttatatataatatatagcaaataaaacaaatgcaacaaaaagcaaatcataaatattcaaggaggaatgacctatgttacttgcaaacagaagtattaacaatttatttgatgatatgtttaaagaccctttcttttcccgtccgttcgagaattcatcttcacagatcatgaagactgacattcacgaaaaagacggcagctatatgatcgagatggagcttcccgggtatgccaaagaggacatcaaggcagacttaaaagacggttatctgacgatcacagcaaaccgcgatgagacaaaagaagaaaaagacgcaaagggcaactgcctgcacaaagagcgctacaccggaagctgcaacagaagcttctatgtgggagacaagataacacaggatgatatcaaagcatccttccgggacggagtgcttcttcttcagattccgaaagaagtgcagaaagttgaagaacaacccaagttaataaccatcgaataaacggaataaagttccgtgaatctcaacagccaaagagagggtgccctcttaagtcatcacatgactttgaggacaccctctctttttcgctgcccgccaggcttcccgcggcagtctgcctattcacgtctgagcagatggatctgtccgataaagggcagttcctttttttcacctctgcatgcgtatacgatccccatgaccgcaaatataaacaatacaagttcaatgaggtcaaagatccatccaaaccaccagccgctgaagctgatcagagaatgcagtccaaatacccagttgcctgaaagcagatttattaccaccgatgtgatgaataatacgagtccctgattggaatggaatctgacgtattcggaattcttattgccggcaagcagcggtatgagcaccagtatgccaagatatgacagcacgcccatccctttgtttgaacgtacatcatccctgtcaaaatatgtcccgccgccctgcctgttcccgctgccgggacctgttgttttgctgtcctgtctgccatactcctgccggtatgtatcctgtccatatgcgttctgtccgtatgtatcctgcccgtacgcgttctgtccgtatgtatcatttccgtaagtgttttgtccgtacgcatcctgaccgtacgtgtattcctgatgtccctgtgcagggatctctgcaccgcactgggggcagtatcttataccgtcaccgacttttgcgccgcatttaatacaatagcccatgtcttatcctccgtcactttattctgtaagtcccagtatctcagaaagcacttcaataatgatctcattggtacatgactttacatatcccatcatgtgcagtgaaatctcatcctgcttctgcgcttctgtaagtttctcattgtgttttgtcccgtcgatcagcccaatgagctggggcgtcagttcttcatacgtctctaccgtcgtctgagtgaccagcctgcgcaggtcttctttatttacaggtaccatctcatatcctccattctgtacgccgataccgccgtctatccgagattgcgcaccttaaaatctctctgggcttcccgctgctggtctttctttgcgatatcctgacgcttgtcatataacttctttcctttggcaaggccgatctccacctttacgagactccctttgaaatacaccttcaagggaactatggcaatccccttctccttcgtcttgccgagcaccttgttgatctccgacttgtggagcagaagttttctcaccctgagcgggtctttattaaagatatttcccttctcataaggactgatatgcatgccatagatgtatacttctccgttctctatccggataaacgattcttttatactgcatttgcccatgcgcagcgactttacttccgtcccgtgcagggctatgccggtctcgtaagtatccaggataaaataatcgtgatatgcctttttgttgttggctatcatcttcccgttactcttcgccatctcccatctctccttcatctgcaatctcaaaatcaatcgtccgcataagtctgtcggtccctatgacacggacagatatacgctgcccaagcttaaataccttgcttctatggacgccgaccatctcataccggctctcataatactcataatggtcgtcggtcatgtttgtcacatggacaagaccttcgactgtattgggaagttcgatgtacattccccattttgtaatactggagatcactccgccaaacacctcgcctacatgagcttccatgtactcaaccttcttaagcttgatcgtctcccgctctgcctcatcggctctgcgctccatctcgctggcgtgttttgtcacttccggcagtatctttttatagtgttttgtcttctcttcatccatacgtccccggagactgtctttgattatcctgtggatctgcagatcaggataccgccgtatcggggaggtaaaatgcgtgtaatagcctgcggcgagaccaaaatgcccgctgttgtccggggtgtaccgcgcctgtttcatagagcgcagcgcaagtctcgtaatgagcgcttcctccggagagccctccacttttgcaagaagcttttgtacctctttgggccttatctcgttcggtccgatgtgcatggaatagccgaaattgttgataaaagctgccagtgtacgtatcttttcatcatccggcgcctcatgcgtacggtatacgaaaggaagttcctgccagtaataatcctccgccactgtctcatttgcaaggagcataaaatcctcgatgatcttagtggctgtgttgcgctcataaggctgtatatcgaccggcttcccattctcatcaagtatcatcttcgtctccggaaaatcaaaatcaatggaacctctcacctgacgtctttttctgagaacggacgacagctcctgcataagctcaaacattggaacgagctcccggaaacgtgctctctcttcctcgtctttgtctgaaaggatcttcttcacccctgtatatgacattctttcatctacgtgtatcactgtctccgcgatctcatggtcaatgacagcgcccctgctgtcgatcttcatgatacagctcagagccagcctgtcctcccccgcgttcagggagcagataccgttggacagcgtgtgcggcagcatgggtatgacacggtccacaagataaacgcttgtcgcccgcttcagtgcctcccggtcaagagcgctgttctcctgtacgtagttcgtgacgtctgcgatatgcacaccgaggatgtaatcgtccccctcttttatgacagaaaccgcgtcgtccagatccttggcgtcctcaccgtcgatcgtgaccatctgccagtcacggagatcttttctgccttccatatccgcttcgctgaccggctttgccacacgctctgcctggttcaggaccttctcaggaaaatcgaccggcaggtcatatcctttgactatggacataatatctgtgcccgggtcgttgatatggccgattatttccacgatcttgccttccggcttccggccgggctccccgtaaaatgtcagttccgccactactttatgcccgtccacggccccttttgacttttcctcaggtataaagatatcctggacaaaccgctggttgtcgggtatcacaaagccatagctcttgccgcgcttcgtctgatagagccccaccagtctcgtaacgccccgggaaacgacttttattatctttccctcacgcctcttgccttccggttccttcgttatcgctacctcaaccgtgtctccgttaaatgcgccgtttgtgtcctcttcacccacaaagatatccgtctcttctccttctacggtgacgaacccaaagcccctctgatgggcctgataaattccagtcaggtgcttcgcttcccccttgcagtatttcccttttctggaccggtggatcctgccctcttcttccagtgacgcaagcacctctttcagctcttttctctgctccttcggaacctgcagcagtatggcgagctccttgaacttcatcgggacatacatctcatcacagaccagatcatatataaccttttttctcttttcaaatgctttatccatcctgcacactccctccggcaaatctccgtaatatgaataaaaagacactcttttacaagagtgtcccatcaatttctcaaaaaatacttctcttaagcaaatacttttaaattcaacactgcagctaatacaatgaacaggatcgccagaaactttgtcgacttgacaagcgctccttccatggaccggcccttgttctgtccccagtaagtatcagccataccaccgatagttccaagtccggcggactttccttcctgcagcagtacgatagctgccagtgcgatacagtctattgcgaatatgatcaataatattgtctttaaaatctccacttcaaacacctcctgcggataaaccatatttagtttagcacaacagggtgaatatggcaagttaaattttatacagcttacaatgtgtgcggcggccctttttaattgtcgctcttaaagggattctcatatttggccgtatctcccagcttctcctcgattctgagcaactggttgtatttggccacacgctcggacctgcagggcgctccggttttgatctgccccgaattaaacgcgactgcgatatcggcgataatagaatcctccgtctcgcctgaccggtgggaaataatcgttttatatcctgcgcttttggccatctctattgcatcaaacgcttccgtcagcgtgccgatctggttgactttgatcagaatagcattggcaacctctgtctcaatgccctttttcagtctctttgtattcgtcacaaagaggtcgtcccccacaagctgcatattaagtccaagccgtgtggtgagcagttcccagccttcccagtcttcttcatcgagcggatcttcgatagacacgatcggaaattcttctgccagatcttcgtaataatcgatcagctcctccacggaacgtatcactttgtagccgtgcattctgccttcaccctcgaagacatatttcttaaagttgcggtcataaagctctgtcgccgcgacatccagcgcgatcactacctcctcccccggctggtagcctgccatgcggatagcgtctgtgataaaccgaagcgcttctctggcatccggcaggtcaggggcaaaaccgccttcatctcccacagccgtgctgtaaccttctttctttaagttcttcttcagtgtgtgatatatttccgaacagatcctaaggccctcccgaaagcagcatgccccggacggcatgatcataaattcctgtatatcgatcgtattatctgcgtgcttgccgccgttcatgatattcatcataggtaccggcatctccttggcattggcgcctccgagatatgcgtagagcggcattccaagcgctttggccgccgccctcgccgccgccatggaaacgccgagcagtgcatttgccccgagattcttcttattctccgtgccgtccatatggatcagcgcctcgtcaagctccgcctgcgcaaagacattcattccgattaccgcaggggcgataatggtattgacatgatttaccgcctgttccgtgccgagcccgccataacggtctcctccgtcccgcagttccactgcctcatactgtccggtggaagcaccggacggcacgccggcacgcccgatgaattcctccccggccaatacttctacttctattgtaggattccctctggaatctaatatttctcttgcgtatacatctgtgatcggtagacaattatacatgtttcaatcctccttatggagcatattatgtaccgattcaaatgttctgattcgcagatcgcctaatatagctgactgtagatttctgccatctgttcccacgaaaattttacgtagctttgatccagcagtcgctgctgactcgcctcaacacttttggcaaagctttctatctcttctcttttcatgccgtattcccgcagacgctttctctcgatgatcttatccagcacgtttttaagttctgtgtacacttctcctgccttgcagccaagcatacctgcaaggcattcatttaatcttttaagctttccttccggccggaatctctgataggcgcaaaagaccgcgatcaggaactgatagttcgcctctccgtgtgtcacgtggtacacaccgctcagaggataggacatggcatggactgctcccgttcccgcattgccgaatgcgatgccggccagattactggctgtcaggaattcttccatcagctccatacgtctgtcagggccattctcgatcacactcctgaaaccgtggattatcatttccatcgcctttatgctgaacatctctgtatacagattcgctttcggagacacataagattctatcgcgtggataaacgcgtctatagcgcttgtggcccagaaggaatacggcagttcactcagcagctgagggataagcaccgcatcgtccgcgtacagctcatccgctgcaaggccgagtttactgttaagctctgtcatctccgtgatagagacattggagacttctgacccggcgccgcacgtggtcgggactgctataagaggatacttctttttaaagaccgccttcttttcaaatatatcctttacggaatatgcgccgtccagaacgagtatcttcgccatatcaatgactgctcctccgccgatcgcggcgatcctttcacatccggaagaccggaaatcacgcagcagagcttccatcatactatcggtcggttcaccttttccgtagtcgtccttatattttacacaggcattcaggccaagaggcccgaaatacttgtcgtatatcgttctgcttgcaagtataaaatctccctcaccgataccatactccttcacaaagtcttctgccagatcaaactgctggatgcgggatttctgctggaatagtttcattatttattacctcttttctatcgtaaattatgataaggtaaatatatcattattccgttgacttttccatatcccggcgttacaatcttcatgaattaaaacaaatatgcattggggaatgtacaaatgaaatctaaaaccaaaagctttgccctgcttacgggcagtacactcatcatggctgtgggcatctacttcttcaagtttgccaacaacttcacctttggcggtattacaggtctggctgtactcgttgccaaatcaggcgtcatatctgccagtgacttcacctttatcgccaatatgatattacttgttatcggatttatcatcttaggcagaaaattcgcggccaagacagcgtactgcagtatactgctctccgtctgtctctccctgctggaacgtgtctatccgctgactcatccgctgacagaccagccggtccttgaactggcatttgcgatcgccctgccgtctcttggctccgcggtgctgtttaatatcggttcttccagcggaggcacggatatcattgccatgatcatgagaaaatacacgagcgcggatatcggcaaagcgcttctcatcactgactttattattacactggcaggctgttttgtattcgacattgagacaggactctattctttcctcggtctggccgtccgctcatttatgatagacggatttatagagagcctgaatctgtccaaatactttaatgtcgtctgcaacgatccaacaccgatctgtgacttcatcaatgatacgctgaagcgcagcgcaacgatcgtactggcccagggcgcattttcaggggaggacaaatatatcatcttcactgcgctgaaccggatagaggcagtcaagctaaggaactttatcaaggaaaatgatccggaggcattcatgctcatctcgaatacaagcgagatcattggaaaaggatttcattctatatagaatacacggacatttcacaacttaaaggctcgttgagatcatacggaaaagcccgggaacttaggccagctttcagctgtatgccagtcttcccgggctttcttctctgtaattatacgattaacctgtgataagtccctgctgtcccatcacatcgatgacctgatccacatatcgcgcgcacagttcatccgtcgccgcctctaccattacacgaataacaggctccgtaccgctttctctcacgagaatacgtccgtcgtcgccgagcgcctctgcgactgcctcgactgccttgacgacctgaggatcttctcttgccgtcttcttgtctgacacgcgcacattcttaagcagctgaggatatatcttcacttcctccgccagtttggacagactcatcttcttctccagcataacctccatcaccataagagaggtcagaataccatctcccgtcgtggcatgcttactgaaaatgatatgtcctgactgttctccgccgagagaaaagttattctgtaccatattctcatatacatacttgtcgcctaccgctgttttttcatattttaatcctgctttgtcacatgctttgtaaagtcccaggttggacatgatcgtcgtcacgatcgtgtcgccgttgagccgtccgttctccttgaggtactttccgcatatgtagaggatgaggtctccgtccaccacactgccgttttcatccacagcgatgcacctgtcagcgtccccgtcataagcaaaagccacatccagcttcttttcttttacatattcctgaagcacttcgatatgagtagagccgcagtttgtattgatatttgtcccgtccggttcattgttgatcacgtaagtctttgcgcccagcgcatcataaacacttttggctatcgcgaacgcgcttccgttcgagcagtcaagtccgactctcatatcttcaaaagagcgggtagccagagagataagatatccgatatagcggtttcttcccgcggcataatcgaccgttcgtccgatcttctcctgcttggcaagcgggatctcccctgtctcgccgtcaatatatttctcgatcttgtcttctacctctgcctccagcttatggccttttccgttgatgactttgattccgttgtcatagaacgggttatggcttgcggaaatcatgataccacagtcaaaattatctgtcctcgtcacataagatacacttggagtcgttgtaacatgcagaagatacgcatccgctcccgacgcagtcagtcccgctacaagcgcatattcaaacatgtagctgcttcttctcgtatcttttccaatgacaacctttgccttatggtcctgaccgtaataccagccgagaaacctgcccaccttaaaggcgtgctccaccgtcagtttttcatttgcttccccgcggaatccgtctgttccaaaatatttacccataataaaagtctcctccatgtcatttgacatatttaccgttttttttgcacgatcagcatttgtgcctttactattatataagtttttttcttaacatacaacccattcagacaaaaaaagcggaagcgcctcctggcgcctccgcttaaaaaccctgtccgtcagctgttcaatatgcttctcgccacgtgaagcccgttggccgacgcctgctgcagtcccctcgtgatcgaggctccgtcgcccatagcgcgcagcccgcggatactcgtctcaaaggagtcatttacgacgactttgttggaataaaatttcacctccaccccgtagagaagggtctcgtcggaggcaattcccggtgtgactttgtcaagcgcctgtatcatctcgtcgatagccaccatgatccggtgcgggaacacgagagacagatctcccggcacagcgtccttcagcgtaggcactatgttgttccggttcagtctttcttctgtcgtccttcttcccctccggaaatcgccgtatctctgcagcaggatccttccgtcacagagcatgtttccaagctgcgctatatgcttgccgtattcgatcggtgatttgaacggctccgtaaaattctttgacacgagcagcgcaaagttggtgttgttcgtcttcatgtccttagacttgtatgcatgaccgttcacaacggccaggccgtcatcatagtattctgtcgcaacctccccggatggattggtacagaacacacggactttatcgtcaaatgtcggtgtataatagacaagcttcgcctcatacagcttttcattcagctccttcatgatctcgtcacgcacctcaaccctgacgcctacatcgacagtaccgttctttgtctcgatcccgtgctccctgcagatgtgcgagaaccattcggaaccttccctgccgatacccgccacgatctccggcgcatagaattcttctccgtcttcggtcacaacgcctctggccgctccgtcctccacaattatatttttcaccatagtcctaaagcgtatctctacgccctgctccaccaggtgctgctggagtcttgtgtatatcttatatccttcttcggttccaagatggcgtatcgggcattcgataagcttcagatttgcccggatggccttggccctgatattttcgatcgcctcatgatcttccataccgtacaccttctcatccgcgccgaactttaaatatatgcggtcagcctcgtggatgagcgaagtcgctttctcatatccgaggatctccggaagtgtcccgcctacatcaggtgacaaagagagcttcccgtcggagaaggctcctgcgcctgcaaaccctgttgttatggaacagggctgacagccgacacatacttttgtcttacgcttcggacattgcctctgttcgatggacctgcctttttctataacgagcaccttcatgccgggtctcttttccataagttcatatgcacagaatatcccggatggacctgccccgataattattacatcatactgattcatgccgtcacttcactttcttgtcaaataatggtttttccctgtaaatccgggctttttgccctgataatcatatcatttcggacataaaaaaacaaggcattaattggggatgttagttggggacggggtttttttcaaaaaaccccgtccccaacttagaaaacccctgtccccaacctcgaatcattcacaaaaaactaaaaaacaccccgcggctgcaggtccgaaacctgctgccgcggggctgcttccgccgtttttaatggtggaacagtcttatccctgtaaaggacataaccatattatatttattacatgtagcgatcacattgtcgtcccttacggagccgcccggctgagcgatatattttactccgcttctgtgggctctctcaatattatctccaaacgggaagaacgcgtcggagccgagggatacatcttccatcttatcaagccatgcgcgttttgcctctgctgtaaatacttccggtttttctttgaagatattcggccatgcgtcgtctgcaagtacatccatgtaatcctcgccgatatataaatcgatggcattgtctctgtccgcccgcctgatcgtatctacaaacggcagctccagcacctggggagactgtctcagccaccagttatctgcctttgtgccggccagtcttgtacaatgtatcctggactgctgtcctgcgccgattccgatagcctgtccgtcttttacataacacacggagttggactgtgtatacttcagcgttatcatagagatcgccagatcgatcctcgcctgctccgtcagctctttattgtcagtcacgatgtctgaaaagaattcgtcgtcaatcttcagttcatttctgccctgctcaaaagtgataccgaatacttccttgtgttccagcggcgccggaacatagtccggatcgatctggatgacattatagttaccgttcttcttctgctttaacatttcaagcgcctccggttcatatcccggagcgatcacgccgtcggatacttccctcttgatgagccgggccgtgtctgcgtcacacacatcggacagggaaatgaaatcgccgaaggatgacatacggtcggctcccctcgcccttgcgtaagcgcacgcaagcggagaaagctctcccagatcttccacccagtagatcttagcaagtgtaccgcttaacggaaggccaactgccgcgcctgccggagagacgtgcttaaaagatgtggccgccgggagtccggtggcctccttaagctcctttacgagctgccagccgttgaacgcatccataaaattgatgtacccgggtcttccgttcagtacctgtatcggcagctcgccaccgtctgccgcatagatcctggacggtttttgatttggattgcatccgtattttaactctaattctttcattcgtctcatgctccttactgattcttgtttatgatcttagtttcatatgtgcctgtcgcaatgtcaatatagcggacaaataatgacactttattgtcttcattcagactgtcccacagcatatctgtaaatgtattcatatcgtcaggaattgaaacaagctttggttcaccctcaaagcttggaagcggatcgccgtcatgcatgtaagtatggatgaaatgcccttctcccggcgctgcgttttcatatgcgaatgtgaatctgttgcatgactcggggctgccgttgttactctttaatatagacatcgcgtaactgtacccgccattttccacatgcatgataccggagatacgcggtgtatagttcggtccgtcaggctcaaactcgcggcttctcaatgactgctcaaatgtcatctgcctgtccatgccttcgtaaatcgtatctgtctggtctccgtttgttacgatcgttttattgccaagcacgcggaccggtgcataaatgatcagacttgggtccgtaagctttgattcgtcaaatgcctgcgtacgtattccctcaccgtcctccacaaagatacggtttctgctgttaacgcttctgcccatgataaaataagcggccactgcctttgtcccgtcttcgcttctcccgattatgataccgcgtcccggataagaattctcctgcagttccttttcaattgatcgcatttccatgaatacatctcctttttcattggtttatcgtgtttcttcattatacctattaaataccggcagttcaataagtatctataaaataccgccgtattttttcttatatattactgtccgcgtttcacagacaatgggaacgccaaaggtattgaagccggagaacggcaatggtacaatagaatcaatgaatatgagggaggaccattattatgaagaaaaaactatcagccatactgcctgtacttttcctgacagcctctgttctcttcaccggctgcggcggatcgtccgcggacgaatatctcggagaacagatcactgccatgaaaaaagaagacaccggcagattctcatcacttttagacgaacagctttcagagacaatggatataaatatgtatgtactcacatttccggatgaactgagaaaaccatatcttgagttcctccaaaaagcgttcgcttccgtagaatttgaagtagcctccgcggacaaaaaagataacggcagctacgctgtgcaggtctctttcacccctctcgatatcggcgggacgaccaaaaaagtgaacgatgcctatgcagaagccatgcagggaaccgacctgacagaagagacgagtgccctgctcgtaaaagcagcggaggccgttaaagacagtcccaaatacagcgcagagacaacgacagagatagaagtgaaaaagaagggcgattcatacgctatctctgacgaagagtacgaaaaactggtctctgcatcactggcagactgcatggccccttacgataccatctgcggtatcctggatgcccgggatctgcttcaggcctttcttgacgcgtcctttaaaggtgaattcacacaatatatgaaacatactgaccaaacagaggaggaagcacaggcatggtatgaggcagacggtgcctttgaccctccgtccgacctctcacctcagtataaggaacgctgcacggaagcttataaagccatactgaagcaatgtaagtattcggtcgggatcccgcacaaggtagataacctgttccattacacggtagacgtgaccgtcacgccaaacaatagtatcaagcaggcctctgacgagttctacgcccgcacattttacagcatggaagaagccagcgccgcatatgcagaaacctttgaaaaatatgcagccgcgccagtatacggcgaggagacgaccatgacagtggaactaagcctctcctcactcctggcttcccaggacgaaaaccgggacctttataccctcgccaaaacaatctgcccgatccctgagtaattgggaattttgttgggaggaatttggggtggatgcggcgtacggcgtaggaagggcggcagtgggctgcggg

SEQ ID NO: 433 - DNA, 7581 bp, Extibacter hylemonae
  source 1..7581: mol_type = genomic DNA
gcgccggacgtctccccgccggccgctatgattttgtttatcccttcctccgccgcttttgcagccagcttagcaagcgtatcctccagcaggcctgcaaacttttgtcctcccagttcctgccccttttttacatcttcccggctgtccgaacagtagacgagcacagagtcatgttcaccggtcagtctgtgttttatttcattccatatcgatgatgctgtctctgtccttttccataattgttccggggagatcttgtaatacggaaggccttgttctttataaaagtggatctgccctgtcgtagcttttgaaatacttccggcaacgatcagtgacgccccttctgccctgatatccatctgacggacgtgtacatcttttctctgcgcacttaagccgccggcaagaacagccgcaagtcccgaaccgcctgacattactctcatatctgaaaacagccgtatgatatgtgcggcatcctcttcattttcataatcgggaattatataatagtgggaatgtccttttgccgcgctctttatatagtcgtatacttcttcacccgtacagctgtaatactttctgccaagctccagacatggatacctgctctgtccgctcatcagtaccgcgatcctggaatcccacatcggtgtcagcgggtgatccttcatactgcttttggacaatggtatcttatctacatataagatgccgtctttcaccgttctcccgtttacagggagcgacggacagagtacggtacaagtttcattcaagtattccagcgctgcatccagcaccggaccgatattgccgtgaggcgtggaatcaaaggtagaacaatattttatataaaacctttcacatcctgatgtctccagagatctgatactttccagtgtatcgaggaccgcttcacggaccggggccgtcctgctttttagagaaatgacgactgcatctgcgtccttaggtatatcgccgtctgcgggtatgccgctgatcagtatcgtacgcagtcctcccctggtcagaaaggaagcgatgtcgccggcgccggtaaaatcatctgctatgcagcctaaaagcaatttatttgtttccatactgccacctcattttaaagctcacgtcagtctctgacctccgcaagcacgctcacctggcagctatccacttccccataacggataggaagcgaaaatactctgacaagtgtgtcattgtcaagtccttccaatgtagcgtcctctatgatcgtactgtagtggccgctccactctccgagaagccatttatgcgccttgtttccatcgtcaggatctgtataagttgctaaagaaataaaatccattatgatccctctcatgttcgggaagtttttattcaggtattctgccgcgtcagaacctactcccggcccctttgccccgtatatctcctcatctgtatcgtgatatcttgagtggccggtccgcagcatgagcagatcacattgctttatctgctctgcatatggttttaattcttccgctgttataagctcattgaatcctttcggtatatctatgatataaggtttctcatatacataccggtccatgggcagatctgcgatcttgatccccccatcgtaatgatgatttggcgcatccatatgtgttccgagatggtttggcacggttatactccactcgttctgcgcccatccttccgtgacatgccgcgtctgttcaaatacgggccggacagccccgggacatactgctgacgtttttgttattttataagataaaaatttataactcatattatccaccgccttttatctgatcatcttttatgtgactttcctgatttgcttttttaatttgccttctttaaattctgcagacagtcgtatcctactgccgccgcgagtacgatacccttgacgatgtactgcacgtatgtgccgacgttcatcagtataagtccgttctggagcacaccgataatgagcacgcccgcgatgacattatggatcctgccgcgcccgccgttgatgctgacgcctccaagcacgatcgcagtcagcacatccatctcaaaccccttgcccgcgtttggtgtccctgaatttgttctggagagcatgacgatgccggcgatgccggcaaacaggccggacagagtataggcgagtgtctttacgctgaatacattgatgcccgacagctttgacgcctcttcatttcctccgaccgcataaaaaaacctgccgaagtatgtcttgttcagtacaaaagctccaaacgcaaaacagaggatcataatgatgacaggaatcggcgcaaatgctatgtaaccttgtccgatgactgcaaacttttccggaaatccgtagattggaagaccgtccgacaggacatacgatgcgccttccagtatcatctgcatggcaaatgtcatgatcaatgggggaatatttacttttgcaatgataatgccgtctatcataccgatgagaatggaaattattaatgtcacagcaaccgccgccactgcgttccatcctttgttcaccatcatatacgcacagattatatttacgaatgtgatgatggcgccgaccgataagtcgatacctccaagcaggatcggaagcatcatgccgaccgctgtgattccgagcatcgatatctgccgcagaactgaacttatattggagcttttaagaaatgccggcgtcattaccgagaatacgatcaccaatataagaagaacgatgaacattgcatataaccttatgtatttttgaaatttaactactttcatatctctcactcctagacttccttggaagcatatttcataattttttcctgagtaaaatctcttctttctacttcaccggcgatcctcttttctgccagcacgatgattctgtccgccataccgagcagttcttccatttccgacgagatcatgatgatcgtctttcccatctctatgagtctgcacatgatcttatatatttcatattttgcgcccacgtcgatccctcttgtcggttcatccagtatgatcagctccggttctgtggccagccacttggccagaacgactttctgctgattcccgccgctcagcagtctgacctgctgttcgtacgaagcacattttatgttcagtgtcttcccgtactcttttacgatcttgttttcctttgctttttcaaggacagatgctttcgagagcgctctcagattagccattgatatattttcacgtatggacagatgtacgtgtacaccgtgctgcttccggtcttcgggaacgagggcgatccctttgctgattgcttctcttgcattcccgggactgtactctttcccgtccagatacatctttccttctttgagcggcacgagcccaaagatgaggtgggacagttctgtcctgcctgctcctacaaggccggcaagaccaagtatctcaccctttctgacagaaaaggacacatctttaagcccgttccctgtcacgtcctgaagttccagtatcttttcttccgtgaacattggttttcgttccggaaatgtatttttcagctctcttccgaccatcagccggatcagctgctctgtatctgtctcttttgtccaccgcgtctctactttctgtccgtcccgcaggaccgtcaccctgtccgacagcctgaatatctcctccagtctgtgtgatatatatatgatcgtcacaccctggtctctcagtgtctcaacgagctggaacattctttctacctctgcatttgtaagaggagccgagggctcgtccataataagcagctttgcgttcatggaaattgcctttgcgatctctgtgatctgctgatatccgacgcttaagttttttacaagctcttccggatcaatatctatattgagctgttcaaatatttccgcagcccttttgttcatttcctgcctgtcaataatgatccccctgcgcacggcgtgcccaagaaaaacattctcagctaccgtcatctcatttacgagattaaattcctgataaatgaccccgatccctttttcctgtgataatgagggcgacagcctttcaaattcctctccattgatgacgatctttccggcatccggtacatatgcgcccgcgcatgtcttgatcagcgttgattttccggctccgttctcccctacgattgcatgtacttctcctctcacaatgtctatagagacatctgacaaggctttgataccaccgaaggctttctctatatttctaaattccaatatcttatcagccatataatcacctgttcccgcggccgggaagcgctctcctgctctttccggccgcatatgttcttatttgtaatattcactcagattactctcatcgatcacctgtacgtttgtgtagaggtctttttctactttttcatctttcagaagtttatccagagtatctgttatggatgccgccttggagagcgggtcgtccaggagaatggacatcttacacggttcgcccgcagctattttggataaaaattcagtcgttccgtcagcgctgaatatacctgcttcctcacctttgatccccgctgcctttaaagcttcgttggcgcccatagctcctccgtcacctacagaacagacaacacggcagtccggattggactggagcacgttctccattgcctgcatccctccgtctgtggaaccttgatgagagacctgtgctacgacctttgagtttggtgaaagttctgtaatggcgtcgttgatgccgtcggctcttttgataacctctgctccggcttccggatagtccagaatacagacttctgcttttccgtccagattatcttcgatccagtccgccgcctgtttaccgatctcataccctacattgtaattgtcaacgagcagacagcagtctgcggcgtcagagtctatatcccaggagatcactttaatacctgcatccattgcttccttcatgactgtctcaagtgccgcctggtccgtcggattgatgacgatagcgtccacgcctttctgtatgaagttctctacctgtgtgatctgtgtctgcgcggtggaactgcagtctacgaccgtacatttccagccgttttccttgcagttatcttctatcgccgtgcacgtttccgcccatatcgtattggccagtgtcattacagtcacaccgatggatatctcctcatcagaaccctttttctctgtttcgctttctcctcctccttttgaacatccgctcataaccaaacatgctgctaatgccgcagccattaataatgataatttcttcttcatctttttcctccatcacattttaattttcagacaggcccgtctttttttgttaaatacagtataacaactatctttttttgttttaatgcggcaatctttgtaatatgtgcactattttacgaatttcagcaaaagataatatacagattcaataatttctttatttctgtgcacataacaaaacgggaaggtctcccttcccgttttgttcactcacatcagcttactgtccgaagcgggacagttctctgtcgcttactttacttagatttctgttatttgacgacaatatgagcacagaagtcccgttcttcttcatatgctccagaaattcaatgacagctttatcgaccaattcatcgttaatggcaaatatctcttcacagatgagaaatgcaggattctgcatctccagccgtttcagatatacgtgccactttgttgtctcatccagttctccgcctgttttatcccagttttcttttctgctgaaaaatcctgacttaaattcacactttacaaagttgcagaaatttttgcttatcacccctgctctgctcatcttttttatggaaccaatataaacattttccagaaccgtaagattatgaaacacataattgtccgccagaatctgcatcctcagtacattaattccctgctttttcatatgtaaaatagatttgggacggtatatgctgcctttgtatcgtacggcgccgttttttatttttttccgcccaatgagataatagaccaattccgtcctttcatttttattcaggtcagataagctgacgatctcgccttcgtatatagaaaatgacaaattcctcagaaactgtccggtaagtcctctcactgaaaagatttcttttctttcttccccggtacttttctgcggcggcgcggcggataccgtctctgaagttttaaaatgcaggcggcacagcggaaattcttctttcagatacgttttcccgatacggccgttttcaaagatcatgatgcggtcacagacattcatcagcacgccgatgttataatctgtaatgacaaaggtctgttttctttccttgagcagtgtgagtattctgagaaattctttctggtcttctttgctgtagtccatgagcagatcacggatgacaataagaggatatccctgtacatatgccttgataagttctatctttcttatatctgtctttggaagctcttccaccagactgccagcatccacgtcaatgttaaattcccgcagtatcctgtccgcctctttatatacggcgtttttatggtatatttttgctcctcttccttttctgactgtgtacagattatctgccactgtcatttcctttataagggaaggctgctctccgatataataagcctttgtctcatttaagatcagcccgatgaccgcatttttttctatatcgctgcgctggagaatgccggccgtctcactttcatacaactccatatatagatgctttacagcacagaacccctggtagtccgcgcttttcccgctgaagcgcagcatttccttcttttccatatgttacctcttgtcacactcccttttccattcctgtattctgaagaggaaggcggatatgtacgtcagttcctgcattttccatacttgatatatacagtccatattcgctgccgaaaagcagctttattctccggttgatatttacgatcccaagcccgtgtgtactcttttctttgatcttatcgttgatataatccacacagttttccagattgaccgttatgtcttccagttcctgttcagacattccgcatccattatccgaacacttgataagcacagcgtcctctgtgcggaatattgtaatgctcagctcacagtccgagactgcacttttgaatccgtgcgatatggaattttctattatcggctgcagcgcaagccttggtatgacattttccataatagccgtatcctctttatcacagttgaccgtaagatgataccgtctgttaaatctgaactgctggatcagaaaataattgtgtacactttccagttcttcacttatcgtaacgagaagcccgctcctgcttatgctgtagctgaaaaaattggacagcgcttttgtcatgcttgccagctcagcagagcctatctgtaccgcctcccctcttatacagtcgagcgtattataaagaaaatgcggat

SEQ ID NO: 434 - DNA, 4791 bp, Extibacter hylemonae
  source 1..4791: mol_type = genomic DNA
gtataaaaaaaaacaccgccgaaaaccttgtaaaatcaacgttttcggcggtgtttccagcgttcctgagcggattcgaaccgctggccttccgcttaggaggcggacgctctatcctgctgagctacagaaacatattaaattgtcagcttttatattttagcattatatcaggaaaaaatcaatatccaattgggacagggtaaattcaaaaagggacaccattatttgaattggggacggggtttttctagaaaaaccccgtccccaactacggctaaaaattaattcttccctgcagccagatatcgcccttgaaacgccggcctacagcgggttcgcctgttaccttcttcacgggcacacagatatcgaattgcagctcatttacgtccagcttcatgatatacagctgttcttttgtatcctcattttctattgtatgtatttccagtatctctcccaatatggaataacagtcgcactctattccaaacggcataaagcatgtgtctacaatactgaatacatcttctgttataagccgtcttgatacttttgagtaaatgtctatatcatccagtgtcaggctctccattgctgcctggtcgccgctttttgcggcgcttagaagcatcatcctgtttctggattcttcctgccttttcttctcggattcggcattttttaatacgggaaggagtattgtccctttgttgcagagcccggaaagtgttacggaaccgtatttcactttctttcccgccatctgcttttccttgataaattctactgaattctgcagataaaatatcaggctgatgcccactttgacatcctcgcagattccgacataggcttcttcacccattctccgctctacgaccacatctgcgtaagatgtcagcccgctgccgataaagtatggataataatactgccgttcaaaatgttcgttgatatccatatctccgcagacggagacgccaattccggcgccgcattccctctggtactcgcagaaatccagttcattttctacttctaccagttcatgatgggtaaatgtatcctctgcttttttcaggaattcattcaattgtctctttgaagttatattgccatatcctatggcccgtaaatatttatgcatgggttcttccttacaatttgaatgttttatttcttttcaatctttttcattccacccatgtacggctgcaatacttccggtatgcggacagagccgtcttcctggagattattctccagaaatgcgatcagcattctaggtggcgctactactgtgttatttaaggtatgtgcaaaatacttgctgtctgttccttttacacggatgccaagtcttctcgcctgtgcatcgccaaggttggaacagcttcctacttcaaaatatttcttctgtctcggtgaccaggcttctacatcacatgattttactttcaggtcggcaagatctccggagcagcactcgagtgtacgtaccggtatatcgagagagcggaataaatctactgtgttctgccacagtttatcataccatgacttgctctcttccggcctgcagacaacgatcatctcctgtttctcgaactgatggattctgtatacaccacgctcctcaatgccatgcgcgcctttttctttacggaaacacggtgagtagctcgtcagtgtctgcggaagctggtcttctggaagcatcgtatctatgaattttccgatcattgaatgttcacttgttcctataagataaaggtcttcgccttctatcttgtacatcatggaatccatttcagcaaagctcataacaccggtcactacattactgcggatcataaatggcggaatacagtaagtaaatccgcggtcgatcataaagtctcttgcgtatgtgatgactgcagagtgaagtctggcaatatcgcccatgagataatagaagccgtttcctgcaacttttcctgcactctcaagatctatgcccttgaagttctccatgatctccgtatgatacggaatttcaaagtctggcaccacaggctcgccgtacttctgtatttctacattttcactgtcgtctttaccgatcggaacagaaggatcgatgatatttggaatactcatcatgatcttcttgatcttttcttctacctgcttttcttcagctgacaaagtctccacccggtcagcattttcctgtacttttttcttgagttcttctgcctcctctttctttccctgagccatgcacgcgcctatctgtttggagattttattcctgtccgcgcgcagcgcctcaacttcctgtttaatatctctattcttctggtctaattgtaatacctcatctacgagaggaagtttatcatcctgaaatttctttttgatattttctttcactatatccggattatttcttacaaatttaatatctaacataattccacctcattattcttttttatttttattctttatcaataatgtcttttatttctttatcgtaggattcgctgaagatagctctgtcgagcgcctctgcctcttcttccgccaattctacataactttcgcccttgacgatctctttaatataagtgtaacagccttccctgctgtgcattgcgtttatcacccagccgttgttgttgccgtccagcatggccaatgcaaaactgagcttaccgcccatctcgttgaacgcgtcatacttgatgataccgagcttctgatagtcgccttccatcttcttgttgatttctcgtatatcctgacggttctgctttgtaactttaagtattgtatctatctccgcaaacttgtctttaaagccttcttctaaagttttgccatcttttcctctcataaacgatgcatagctgctttttaaccggttatacttcatggtgacgtttacatataatataaacaatacgataaacaatatcaacataaagatgaagataaaagccgggtcgattcctaatgcatttagtatcttactttccataaatgtctattctcctttgttgacgctcatcattaaatcgaacacacgttctagttcgctgtccgaataatattctatctctatcttaccttttccttttcctttagatgctatacttactttagtacccattacttcttttaatttttcggccagatctgtatatacaaactgattttcaattattttcttttcctttggttttttaggatttttaagttctttgatcagtttttcagtctcccggacactcagcttctcatcaaatattttatttgccagtatatattgctgttcatggtcatctatcgcaagaagagccctcgcgtgtcctgttgaaatcatatcatctatgatcatctgctgtactttctcatccaatttgagaaggcgcatagaatttgtaacagctgttctgctctttgaaactctttcagctacttcatcctgctttaagttaaattcttccaaaagctttttaaatgccatggcttcttcaattggattcagattttccctctgtatattctctataagggaaatttccacaatttcctgttctgtatagtcttttacaataaccggcacttctttaacgcctgccatcttggcagccctccatcttcgctcccctgctattatttcaaaataatcttttctttttcttacaagaagcggctggagtacaccaaactgttttatggaatcagccagctctaacaatgcatcctcttcaaaatttttacgcggctgctctctgtttggctctaccatatttatcttcatcattcgctcccctgtgtctgatttattatcttccaagggggtactcgtattggtcgtagttgttttcaggggtttgtctgggattaagctgtcaagtcctttgccaagccctttcttttttactgccatattgtcctccatactaattattttttattcattacctcttcagccaatttcatatagctttccgaacctgcggacttcggatcatattggcttatcggcattccatagcttggagcctctgccagacgtatatttcgcggtatgatcgtcttatatattgcctgttgaaggttatctttaacgttttccactacctgcaatgacaaattagtccttgcatcatacattgtgaatacaactccctctatttcaagtccaggattcagacgttctttcacgagttcaaccgtatgtatcagctgacttagcccctctaacgcataatattcgcattgaattggtactaatactgtatctgcagtcgtcatggcattgatcgtaagcatacttagcgacggcggacaatcgataataataaaattatagttatccctgatatctttaattgcttctcttacaataaattccttttcttctaccccgatcaattctatttcagccgcagataaatctatactagtaggtaatatatcaagattttcaagtgcttctttctgtaagacctcttctacatcagcttctccgataatcaaatcataaattgttttttctaccgtttccttatctaatccaagcccactcgtcatatttccctgtggatccatgtccacagcaagaaccttctggcccttttctgccagacaggcggacagattgatagctgttgtagtctttccaactccacctttttggttggcaatggctataactcttcccattttaatcacctttctgttttttgcatagatttagtataccacctttttgttattatatctact

SEQ ID NO: 435 - DNA, 1343 bp, Extibacter hylemonae
  source 1..1343: mol_type = genomic DNA
gcgtaccgaacttaaagtagggaagtatgtgagccatgcgtcaagaaaagccgctatcgtttatatcgtgcccgtaccgtaaaccgacacaggtggatgaggagagaatcctaaggccgacgggagaagcattgttaaggaactcggcaaaatgactccgtaacttcgggagaaggagtgccagagagatctggccgcagagaattggcccaagcaactgtttagcaaaaacacaggtctatgcaaaaccgaaaggtgaagtatatgggctgacgcctgcccggtgctggaaggttaaggggagaggttagcgcaagcgaagctttgaacttaagccccagtaaacggcggccgtaactataacggtcctaaggtagcgaaattccttgtcgggtaagttccgacccgcacgaaaggcgtaatgatttgggcactgtctcaacaatgcacccggtgaaattgaaataccagtgaagatgctggttacctgcgccaggacggaaagaccccatggagctttactccagcttgatactgggattcggtattgcatgtacaggataggtgggaggcaaggaagtgatgacgccagtcgtcacagagccgctgttgggataccacccttgcagtattggatttctaaccatcagccgtgaaccggctgggggacaatgtcaggtggggagtttgactggggcggtcgcctccgaaagggtatcggaggcgctcaaaggtcctctcagaatggtcggaaaccattcgcagagtgcaaaggcaaaagagggcttgactgcgacaccgacgggtggagcaggtacgaaagtaggacttagtgatccggtggtataaagtgggattgccatcgctcaacggataaaagctaccctggggataacaggcttatcactcccaagagttcacatcgacggagtggtttggcacctcgatgtcggctcatcgcatcctggggctgaagtaggtcccaagggttgggctgttcgcccattaaagcggtacgcgagctgggttcagaacgtcgtgagacagttcggtccctatccggcgtgggcgtaggatatttgagaggagctgtccttagtacgagaggaccgggatggactggccgctggtgtatctgttgttctaccaagagcatggcagagtagccaagccgggacgggataaacgctgaaggcatctaagcgtgaagcccccctcaagatgagatatccctgcgcaagcagtaagaccccttgaagacgacgaggtagatagggcagaggtggaagtgcagcaatgtatggagctgactgctactaatcggtcgagggcatgaccaagag

SEQ ID NO: 436 - DNA, 912 bp, Extibacter hylemonae
  source 1..912: mol_type = genomic DNA
gaactttgtattgactgagtggcggacgggtgagtaacgcgtgggcaacctgccttacacagggggataacagctagaaatggctgctaataccgcataagacctcagtaccgcatggtagaggggtaaaaactccggtggtgtaagatgggcccgcgtctgattaggtagttggtagggtaacggcctaccaagccgacgatcagtagccgacctgagagggtgaccggccacattgggactgagacacggcccaaactcctacgggaggcagcagtggggaatattgcacaatgggggaaaccctgatgcagcgacgccgcgtgaaggatgaagtatttcggtatgtaaacttctatcagcagggaagaagatgacggtacctgactaagaagccccggctaactacgtgccagcagccgcggtaatacgtagggggcaagcgttatccggatttactgggtgtaaagggagcgtagacggcatggcaagtctgaagtgaaagcccggggctcaaccccgggactgctttggaaactgtcaggctagagtgtcggagaggcaagtggaattcctagtgtagcggtgaaatgcgtagatattaggaggaacaccagtggcgaaggcggcttgctggacgatgactgacgttgaggctcgaaagcgtggggagcaaacaggattagataccctggtagtccacgccgtaaacgatgattactaggtgtcgggaagcaaagcttttcggtgccgcagccaacgcaataagtaatccacctggggagtacgttcgcaagaatgaaactcaaaggaattgacggggacccgcacaagcggtggagcatgtggtttaattcgaagcaacgcgaagaaccttacctgatcttgacatcccggtgacaaagtatgtaa

SEQ ID NO: 437 - DNA, 552 bp, Extibacter hylemonae
  source 1..552: mol_type = genomic DNA
tcccgcatccaatgctcctctaccgatgtacttcgtacatccctgagcttcggtagtgtgtttcagccccggacattttcggcgcaggacctctcgactagtgagctattacgcactctttgaatgtatggctgcttctgagccaacatcctagttgtctttgaaatcccacatccttttccacttaacacacattttgggaccttagctgcaggtctgggctctttccctttcgactacccaacttatctcgtgcagtctgactcccatacatcatctacgcggcattcggagtttgatattcttcggtaagctttgacgccccctaggaaattcagtgctctacctccgcaagacttgtatgaggctagccctaaagctatttcgaggagaaccagctatctccgggttcgattggaatttctcccctatccacacctcatccccacccttttcaacggatgtgggttcggtcctccattgccttttacggcaacttcaacctggacatggatagatcacccggtttcgggtctactctgactgacttat

SEQ ID NO: 438 - DNA, 445 bp, Extibacter hylemonae
  source 1..445: mol_type = genomic DNA
aactaaacaataaacaacaacccctacttcttcttttccttagaaaggaggtgatccagccgcaccttccgatacggctaccttgttacgacttcaccccagttatcggtcccaccttcgacggctccttcctttcggttaggtcaccggcttcgggcgttactgactcccatggtgtgacgggcggtgtgtacaagacccgggaacgtattcaccgcgacattctgattcgcgattactagcgattccagcttcatgtagtcgagttgcagactacaatccgaactgagacgttatttttgggatttgcttgccttcacagggtcgcttccctttgtttacgccattgtagcacgtgtgtagccctggtcataaggggcatgatgatttgacgtcatccccaccttcctccaggttatccctggcagtctctctagagtgccca

SEQ ID NO: 439 - DNA, 279 bp, Extibacter hylemonae
  source 1..279: mol_type = genomic DNA
acaccggatttgcctgatgtacgcctaccccgcttgcgccggtctttccattcccggcttatgctttccacacgtgtccccacagttctgttatatcgtggtacaggaatctcaacctgttgtccatcggctacgtctttcgacctcgccttaggccccgacttacccagagcagatcagctttactctggaaaccttagatattcggccggaaggattcccaccttcctctcgctactcattccggcattctctcttcgatgcagtccacagctcctt

SEQ ID NO: 440 - DNA, 249 bp, Extibacter hylemonae
  source 1..249: mol_type = genomic DNA
gaatataaataatgttttctcaccggacgtaacgtccagtaagttttcattacctcggatgtcttgattaaataagatatttaatctttatttctttgtatgcaattttcaaggtacatgcttgatgcgcggcatgtgacgccgtggacatcaaatggagaatacgagattcgaactcgtgacctcctgcttgcaaggcaggcgctctcccaactgagctaatcccccgtctggtgtttgttctgtttt

SEQ ID NO: 441 - DNA, 241 bp, Extibacter hylemonae
  source 1..241: mol_type = genomic DNA
ttggtcatgctaaaaagagcatatggtggatgccttggcactaagagccgatgaaagacgtgataagctgcgaaaagcttcggggaggagcaaatatcctttgatccggagatatctgaatggggaaacccagctgaggaaacctcagctatccttacgccaatccataacgtaaggaagggaacccggtgaactgaaacatctaagtagccggaggaagagaaaacaacatgtgattccg

SEQ ID NO: 442 - DNA, 206 bp, Extibacter hylemonae
  source 1..206: mol_type = genomic DNA
agtctttaaccttgccagccagcgtaactcgccggaccgttctacaaaaagtacgcggttcaccgcataagggtgttccacagcttgtaaacatatggtttcaggttctctttcactcccctcccggggtccttttcacctttccttcacagtactatgcgctatcggtcactaaggagtatttagccttacggggtggtccccgc

SEQ ID NO: 443 - DNA, 205 bp, Extibacter hylemonae
  source 1..205: mol_type = genomic DNA
tgatctgagactggagcattatgacagttgtctggttctgcagcagctccatctcatagttattgagcacctcttcttttatatcctgtccggctcccttttcatcatacagcttaatgagcgtgcccctgaccttttttgactgaaaaatggtcagtaccagaaccgccatgatcacgcagacgagtatgatacagagccattt

SEQ ID NO: 444 - DNA, 196 bp, Extibacter hylemonae
  source 1..196: mol_type = genomic DNA
gtgttcttccataggatttttttgattatatttcttatatttataattagtaccacgagaatacaatcccattagccgcattaaacgtgcaactcgtttatgattgacttttactccttctaactctaatacttttgtaatacgaacagagccatatcgacctttatgttcctcgaaaatatgttttattttttcg

SEQ ID NO: 445 - DNA, 191 bp, Extibacter hylemonae
  source 1..191: mol_type = genomic DNA
cgccctttttgcacccctgcacacccggactcctcacctgttcctcctaagccgctgaactttcacaaccgggaggttcctccaagcggttccgatggataaacctgttaccaaaatccatcgcggtagattccgataatcctgcgcgagaaagaaatttgagctttatggtataccaggcgaagggaagg

SEQ ID NO: 446 - DNA, 186 bp, Extibacter hylemonae
  source 1..186: mol_type = genomic DNA
gggtcatatctttcttatcatgcgcgtgtcatctccagcgcgcggatgaaaaagtcctcctgtccgaaattcccggactttaagataagccttctgtccgcgctgtctgccggtataagtaccgggacgccgggagccacactttgtgctgtgtaaaaggacttatatccgagcttttttgtcact

SEQ ID NO: 447 - DNA, 153 bp, Extibacter hylemonae
  source 1..153: mol_type = genomic DNA
gctggcagccacctgctctcccacaccgtctccagtgcagtaccatcggccgcctgagccttaaccatcgtgttcgggatgggtacgggtgtttcccccaggcgcatcgccaccagcagtcctttttaaacttttgaaggcttaaaaaagctc

SEQ ID NO: 448 - DNA, 137 bp, Extibacter hylemonae
  source 1..137: mol_type = genomic DNA
gttcagttttactccgtgagtgcagtctttcctctacctcgaatccacttcgttccttctcggtagactcaatccttcttatgcatcctgtcttccattcctgctcctgcaagctcgcttgcgtcacaggactggcc

SEQ ID NO: 449 - DNA, 134 bp, Extibacter hylemonae
  source 1..134: mol_type = genomic DNA
atttcttttatataacgaaatcttatgtattctttttcttcaagaaggcctagaatttttttaataattccagttctttacgaagctccaagttttcattttttaattttctgatttcatactgatacgaatat

SEQ ID NO: 450 - DNA, 131 bp, Extibacter hylemonae
  source 1..131: mol_type = genomic DNA
acttttcttgagtatatatcaataaatacagctaaatataaggttctttttttagtcggaatataagtaatatcaccaacccagattttatttttacattctgctttaaatatctgattcaataaattagg

SEQ ID NO: 451 - DNA, 131 bp, Extibacter hylemonae
  source 1..131: mol_type = genomic DNA
caggtgtggaaggcgttgctgcagaaagcgccggaaacagacacggggatgttatcacaaataacatccccgagagcctctgagggaagaaatcccttcaggatttcatcccgaataggctcggttgtctg

SEQ ID NO: 452 - DNA, 130 bp, Extibacter hylemonae
  source 1..130: mol_type = genomic DNA
attgattcaggaagagtagcagaacggttttgggaaagccggccagagagggtgaaagccccgtaagcgaaagtctgactgacatggcggtatccagagtaccacgagacacgagaaaccttgtgggaac

SEQ ID NO: 453 - DNA, 128 bp, Extibacter hylemonae
  source 1..128: mol_type = genomic DNA
agtgggcttaagtggactcgaaccaccgacctcacgcttatcaggcgtgcgctctaaccggctgagctataagcccgttctctggtcttttatctaaaaaaggcttccgcctctttttcttttttaaa

SEQ ID NO: 454 - DNA, 118 bp, Extibacter hylemonae
  source 1..118: mol_type = genomic DNA
gtactctttcttcggaacaccggtgacaggtggtgcatggttgtcgtcagctcgtgtcgtgagatgttgggttaagtcccgcaacgagcgcaacccttatctttagtagccagcattt

SEQ ID NO: 455 - DNA, 117 bp, Extibacter hylemonae
  source 1..117: mol_type = genomic DNA
cttaatatttcattttcaatatctcgattagaaggttttctttgtaagtatttataatatccagatctggaaacattgagaattttacaagccttcttgatatttaaagagttttga

SEQ ID NO: 456 - DNA, 102 bp, Extibacter hylemonae
  source 1..102: mol_type = genomic DNA
agtgcggttccatgacctggaaacgcactttctccgtattcttcatattcatttatccagcgatataatgtgttgtaatgaatagacaattcttttgcaact
